United States Patent Application Publication US 2011/0111458 A1 - sequence listing, part 3

SEQ ID NO: 1 - DNA, 4646332 bp, Escherichia coli W3110 (residues 3,097,557-4,646,332 of 4,646,332)
ctatcgttctgtttattaaactcatcacgctgttggtgaatttttttaaaggcgtcttcgcgggtcatttgcttaccgtttgcatcttttccccaatatgcatccgctgctttctgcgccgccaccatttgcttatcaagcgctttcacttccttttccagcgcaggaatcgagttcttctgggtattcaacgcagattcaagctgactaaagcgataattgaaatcttcgctattcacgatcagatatttattattcgttttgatatcgtcgaccacccgcccacgatcgctggctgccgcctgaaaagagtaaaagttcaccgaccagccagacgcgggcgttcctttactggttaacatcgccgagaattttaccggtttatctttcgtccaggtctgttcgagcagttcgtaatctgccaactgaccgacccaggtatagagatcgtcactggaagagacatcgccttccgctgaccaggtggcctgattacccttagcatcaagattttttaaggtgatagcatcaagcttgagaatgccgtgatactgctttttgaattgatcttttaagatattttcagttggcggttcgccatctgcccaggcattaccagtcatcaacataagcagtgccgtgccaacaatccattgctttttcacccgaaaaacctcacgcggaataatttattccggtgattatcattagggtaattaaaattggcaatggacgtgagtctgaagtgaaaaagccccggcacgataccggggcgaggcgattagtactgattgaagatctgctggatctgctgcggatctttggtttgcgtcagagccagttgcagcagaacgcgcgctttttgcgggttcagcgtgccagaggcgacgaagccgtatttcgcatcatccacttcggcatcctgagtggtagcgcccgtcggtacgcgggaagaacgcacgactgcagtaccggttttcgcggcggtcgccagcgtgtcgaacacagatttatacaggttgccgttacccacaccagcgctaacgatgccatcatagcccgcatctaccagtgctttagccggaagatcggatgcgttagcgtagttataaacaatgccgactttcggcagttcattcagcttagagacatcgaatggcgtgtcgctggtatgcttacgtgccggggtacgctggtagtcaatcttaccgttgtgaatgtaacccagaggaccgtagttaacagacttgaaggtcgctacgtcggtggtgttggttttggtgacgtcacggccatcaagcacggtgtcattcatcactaccagcacgccacggttggcggaggctttatcagctgcggtcactaccgcgttatacaggttgaatggaccgtctgcgctcatagacgtggacggacgcattgcgccgaccatcaccaccggtttgtcgcatttcaccgtcaggtcgaggaagtaagcagtttcttccatcgtgtcggtaccgtgggtaatgacgaagccgtcggtcttatcgcagtcggtgttaatttttttcgccagtgtcagccagacattatcgttcatgtcctgggagccgatattcactacctgctcgcctttaacgttcgcaatgtcttttagttgcggcaccgcattaaccagattttctacgccaactttacccactgtgtagttagatttggttgcggagtcaccaccaccggcaatggtcccgccggttgctaaaatggtgatattgggtaatgccaatgctgcaccactaaaacccataaccagtgcggcaagtgccgtctttttgaaaaactccatttcattcctccagttacgtgaacgctacgcattatcccttagctctgtatgggaaatttgacgttaaacaatttacaacgtgaatatattttggagatctacaaagttagaggcaggtaacaaaacgaagaattaaacggcataaaaaagtattatgccgtcttaaaatagaggattattttaaattcccgaccagggctttgcggctatcttccagagtcacaacgcggctacaaacatctttgccaaactgctggaaatctttttcctgctttttccactcggtttggattgaggattgcagcccccccaggcttcccagcacattctgtaatgggttaccgccgcttttcagcaccgctttcgcgcccatttcattaatgctgtcctgtaaaattccacccattgcctgattcactaattgctggccttcggcgcgaacctgatcaatggctttatagtgaaacgtcaggccatcgctgcgcgtttcaataatgcggttcatctgctctttcagctgcgcatcaagtttggtcagacggctgcgcattttgctgctttcgcccatctcctgaacgataattttatccagagcaatacgggctttctcgacgcggcttttcgcgccttcatcaatccacggcagcgtgctgcgtagttcagcctgataatccttcgcctgctcgcgctgggcggcattcagggaatattgcttaccgttatacatcacgttgccgtctggcgtgatcaccagattgccgttttcgcccttcacctgcacggtttgcgggctgacaatcacatcgtcacgcggcgtgacgctgcactggtagtcggcgtgagcggtcattgccgtcactgaaagtgctgccgccagcagcattttgcgcatcatagtcttccctcaagaaaaaatcaggccagcatttgctggccccagattgataacaaagtacgcgttttccatgccggatgcggcgtaaacaccttatcccgcctactcgatcgtgcatctttccaggcctgataagcgtagcgcatcaggcagttttgcatttgtcatcgcccgtatgctttcttagtcccaccaaacgtcgaaaagttcgctggtgcgtacctcatccagtttgcgctcttccagccacttacgcacaatcgcctgatgttcttcggtgcatttgccgatttcctgcatgcagatcagaccttcccaggccagataaccgctgccgtcaaaggccagtttgttcggttcgataacctcgttaataaaatcatcaacggttttatcaatctgttcttccgatgtaccttccgggaatcgccatgccaccgaaaatcctaattcctggaattcgtcgatgtgcatttttttacgcagacgacggctacggttctttgccattatttcaccctctcgaacattaagtcccatactccgtgaccaagacgatgaccacgttgttcaaatttcgtcaccggacgtgatgccggacgcggtacgtaatcattgctctctgacaggtttttataaccgtcaatagaagacatcacttcaagcatatgttccgcataaggttcccagtcggtcgccatatggaatacgccccccagctgcagtttgctttttaccagttcggcaaacggcacctgaacgatacggcgtttattatggcgcgctttgtgccacgggtcagggaaaaagagctgcaccatgcgcaatgaattgtcaggaatcattttatgcagcacttcaaccgcatcgtgacacatcacgcgcaggttgcttaaaccttcttcatgcgcagaagccaggcacgcaccaacgcccggtgaatgcacttcaatgccgaggaagtcctgctcagggcgatctttagccattgccaccagcgacgcccccatgccaaaaccaatctcaagcgtcaccggcgcttcacggccaaaaagcgcggggaaatccagcatatcttcgctgaactcaacgcccatcaccggccagtagttttccagcgcatgttcctggcctttggtcagtcgcccctggcggcgcacaaaactacggatacggcgcagtgggcggccgttttcatcaaattccggtgaaatgacgtcgtttttcataaaggtttagtcgcttgtgaaagtgttctgaaaacgggcattatccaaagttagttgccggatgcaagcatgataaggccgtggctgcggaaagttccggtttacaccctgccgtcgctgtgctgcaatcttgcccccaacaacagtgaattcggtgaccatgcaagcgtcgcaattttcagcccaggttctggactggtacgataaatacgggcgaaaaactctgccctggcaaattgacaagacgccctacaaagtatggctctcagaagtgatgttgcaacaaactcaggttgcgaccgttatcccctattttgaacgctttatggcgcgcttcccgacggtgaccgatctcgccaatgcgccgctcgacgaagttctccacttgtggaccgggcttggctattacgcccgcgcgcgcaatctgcataaagcggcacaacaagtggcgaccttacacggcggtaaattcccggaaacctttgaggaagttgcagcactgccgggcgtcgggcgttccaccgcaggcgcgattctctcgctttctctgggtaagcactttccgattctcgacggtaacgtcaaacgcgtgctggcgcgctgctatgctgtaagcggctggcctgggaaaaaagaggtcgagaataaattatggagtttgagcgagcaggtgacgcccgcggttggcgtggaacggtttaatcaggcgatgatggatttgggtgcgatgatttgtacgcgctcgaaaccgaaatgttcgctctgtccgctacaaaacggatgtattgccgccgccaacaatagctgggcgctttatccgggcaaaaaaccgaaacagacgctgccggagcgcaccggctactttttgctattacagcacgaagatgaagtattgctggcgcagcgtccgccgagcggattgtggggcggtttatactgtttcccgcagtttgccgacgaagaaagtttgcggcagtggctggcgcaacggcagattgctgccgataacctgacgcaactgaccgcgtttcggcataccttcagccatttccacttagatattgtgcctatgtggcttcccgtgtcgtcattcaccggctgcatggatgaaggcaatgcgctctggtataacttagcgcaaccgccgtcagttggcctagcggctcccgtggagcgtttgttacagcagttacgcactggcgcgccggtttagcgcgtgagtcgataaagaggatgatttatgagcagaacgattttttgtactttcctgcaacgtgaagcagaaggtcaggattttcagctgtaccccggcgagctgggaaaacgcatctataacgagatctccaaagaagcctgggcgcagtggcagcacaagcaaaccatgctgattaatgaaaagaaactcaacatgatgaatgccgagcaccgcaagctgcttgagcaggagatggtcaacttcctgttcgagggtaaagaggtgcatatcgagggctatacgccggaagataaaaaataaaaacagtgccggagcacgcctccggcaacttgcataaaaacaaacacaacacgcacccggaatgatgaaaaaatatctcgcgctggctttgattgcgccgttgctcatctcctgttcgacgaccaaaaaaggcgatacctataacgaagcctgggtcaaagataccaacggttttgatattctgatggggcaatttgcccacaatattgagaacatctggggcttcaaagaggtggtgatcgctggtcctaaggactacgtgaaatacaccgatcaatatcagacccgcagccacatcaacttcgatgacggtacgattactatcgaaaccatcgccgggacagaacctgccgcgcatttgcgccgggcaattatcaaaacgttattgatgggtgacgatccgagttcggtcgatctctattccgacgttgatgatattacgatttcgaaagaacctttcctttacggtcaggtggtggacaacaccgggcagccgattcgctgggaaggtcgcgcaagcaacttcgcggattatctgctgaaaaaccgtctgaagagccgcagcaacgggctgcgtatcatctacagcgtcaccattaacatggtgccgaaccaccttgataaacgtgcgcacaaatatctcggcatggtccgccaggcgtcacggaaatatggcgttgatgagtcgctgattctggcaattatgcagaccgaatcttcctttaacccgtatgcggtcagccgttccgatgcgctgggattaatgcaggtggtacaacatactgccgggaaagatgtgttccgctcgcaggggaaatccggcacgccgagccgcagtttcttgtttgatcctgccagcaatattgataccggcaccgcgtatctggcgatgctgaacaatgtttatctcggcggaattgataacccaacatcgcggcgttatgccgtcatcaccgcctataacggcggcgcaggcagcgtgctgcgagtcttttcgaatgataagattcaggctgccaatattattaacaccatgacgccgggcgatgtttatcagacgctgacgacccgccatccctctgcggaatctcgccgttatctttataaagtgaataccgcgcaaaaatcctaccgccgccgataattccattaaccgcccctgacgatgctcaggggcaaaaatgttatccacatcacaatttcgttttgcaaattgggaatgtttgcaattatttgccacaggtaacaaaaaaccagtccgcgaagttgatagaatcccatcatctcgcacggtcaaatgtgctttttcaaacactcatccgcatcacgatgtgaggaaattaacatgaatcttaagctgcagctgaaaatcctctcttttctgcagttctgtctgtggggaagttggctgacgaccctcggctcctatatgtttgttaccctgaagtttgacggtgcttctattggcgcagtttatagctcactgggtatcgcagcggtctttatgcctgcgctgctggggattgtggccgacaaatggttaagtgcgaaatgggtatatgccatttgccacaccattggcgctatcacgctgttcatggcggcacaggtcacgacaccggaagcgatgttccttgtgatattgattaactcgtttgcttatatgccaacgcttgggttaatcaacaccatctcttactatcgcctgcaaaatgccgggatggatatcgttactgacttcccgccaatccgtatctggggcaccatcggctttatcatggcaatgtgggtggtgagcctgtctggcttcgaattaagccacatgcagctgtatattggcgcagcactttccgccattctggttctgtttaccctgactctgccgcatattccggttgctaaacagcaagcgaatcagagctggacaaccctgctgggcctcgatgcattcgcgctgtttaaaaacaagcgtatggcaatcttctttatcttctcaatgctgctgggcgcggaactgcagattaccaacatgttcggtaataccttcctgcacagcttcgacaaagatccgatgtttgccagcagctttattgtgcagcatgcgtcaatcatcatgtcgatttcgcagatctctgaaaccctgttcattctgaccatcccgttcttcttaagccgctacggtattaagaacgtaatgatgatcagtattgtggcgtggatcctgcgttttgcgctgtttgcttacggcgacccgactccgttcggtactgtactgctggtactgtcgatgatcgtttacggttgcgcattcgacttcttcaacatctctggttcggtgtttgtcgaaaaagaagttagcccggcaattcgcgccagtgcacaagggatgttcctgatgatgactaacggcttcggctgtatcctcggcggcatcgtgagcggtaaagttgttgagatgtacacccaaaacggcattaccgactggcagaccgtatggttgattttcgctggttactccgtggttctggccttcgcgttcatggcgatgttcaaatataaacacgttcgtgtcccgacaggcacacagacggttagccactaattacgcaaagaaaaacgggtcgccagaaggtgacccgttttttttattcttacttcaacacataaccgtacaaccgtttcacgccatccgcatcggtttcgctataaacaccttgcagctccggcgaaaatcccggcaacaaattcaccccttcttccagtgcaaggaaataacgttgaaccgccccaccccagacttccccgggtaccacgcaaagcacgccaggtggataaggcaacgccccttctgccgcaattcgcccttcggcatcacgaatccgcaccaactccacgtcaccgcgaatataagcgctatgcgcatcctgggggttcatcaccactgacgggaaactctgctggcggaacatcgctttttgtaggtctttgacgtcgaaactgacatacagatcgtgcatctcctgacacaactggcgcagggtgtagtcgcgatagcgcaccggatacttgttataaacgctcggcaacacctcaaccagcggcgagtcatcctcaatatgctgttcaaattgcgccagcatcgccaccagttgtgccagcttctcgtggctttccgccggagttaataaaaacagaatggagttgagatcgcacttctccggcacaatgccgttctcacgcagatagtgcgccagaatcgtcgccggaacgccaaagtcgctatattcgccggtttcggcatcgatacctggtgtagtgagtaacagcttgcacggatcaacaaaatactgatccgcggcatatccttcaaagccgtgccacttcgcccccggctcaaaactgaaaaaacggcggtcgctggctaacactgatgtcggataatcctgccacaatttgccatcaacaacgggcgggataaacgggcggaacagcttacagcgcgcaagaatagccttgcgcgcttcaatccctatctcaacacactcagcccacagccgacgcccactctccccttcatgaattttggcgttaacatccagtgcagcaaacagcggatagaaagggctggtagaagcatggagcataaaggcgttattcaaccgcttatgcgggcaaaaacgcgcctgtccgcggatatggttatcttttttatggatctgcgacgtctgtgagaatcccgcctgctgtttgtgcaccgactgagtcacaaagatccccggatcgttttcgttaagttctaacagcagcggcgagctatccgccatcatcgggataaattgttcataaccgacccacgcggaatcaaacagaatgtaatcacacagatgcccaacggtatcgatcacctgacgggcgttatagacagtgccgtcataggttcccagctgaataatcgccaggcgatacgggcgcggcaggtcggctttttctggcgcaacgtcgcgaatttgctggcgcagatactcttcattaaaacagtgcgcatcaataccgccaatgaaaccaaacgggttgcgtgaagcttccagatagaccggcgtcgcccccgcctgaatcagcgcgccgtgatgattcgacttatggttgttacggtcgaagagcaccagatcgccacgcgttaacagcgcattcgtcaccactttattcgctgccgatgtgccgttcagcacaaaataggttttatcggcatgaaagactttggctgcgaatttctgcgcatctttcgccgatccttcatgaataagcagatcgcccaattttacgtcagcgttacacatatcggcgcgaaagacgttctcaccaaagaaatcgtaaaaatggcgtccggcaggatgctttttaaaaaacgcaccatgttgatgtccagggcaagcaaaggtgctgttgcccatctcaacgtactgcgtcagcgtgtcataaaacggtggcagcaaattctcttcatactgacaggctgcggattccagctccagccactgctgctcgttgccgttgattaccgccgtaacgcccgcaggtaattcaacagcatgttcggaatacaaaaacaccggtagatgaaaaccggtgcgcttaagcaacgcaagaatgccactgcgactatccgcagcggtaatgacgactgccgcgacgtccgtaaaatcagtatctcccaacgccaccacgcgacgatgagaagaaagtcgggataccagttcactactggcggcaatattcattgatttcataagcgcaaacccgtttcggggaagtaagaataccggacaaggtggaaaaccctgccccatgagatatgggtcaaactggtcaccagctccgaccgccagacatcagtaaaagcagaaacgctctgattttactgttgtcctgcagtgagcgtgcgttaacttcaccgcatgagcagtaacatagaaagggaaacgtttcgcgcgaaacggcgataagcgagagaatgtaaggagatggcgtgcatcgggcaaactccgtacagagaggagaaaattcgcgcaatcatggcacctttcgctaaagcgtgcaagccaggactttgcgaacaaacaagccatcgacggcaccaaacggtcataataagaaaatcaaacaatacagctaacaggaactcttgtggtcatcggcccttttatcaacgctagtgcagtcttactgggtggcgttctcggcgcactgctcagccaacgcttaccggaacgtatccgcgtctccatgacatcaatttttggtctggcatcgctggggattggtattttactggtggtgaaatgtgccaaccttccagcgatggttttagctacgctacttggcgctctaattggcgaaatttgtttgctggagaaaggtgtcaatacagcagtcgccaaagcacaaaatctgtttcgtcactcacgtaagaagccagcgcatgaatcttttattcagaattatgtcgcgattattgtcctgttttgcgccagcggcaccgggatcttcggggcgatgaacgaagggatgaccggcgatccgagtattttaatcgccaagtcatttcttgatttctttacggcgatgatcttcgcctgctcgctgggtattgcggtatcggtgattagtatcccattactgatcatccagttaacgctggcgtgggctgccgcgctgattttaccgctgaccacaccgtcgatgatggcagacttcagcgccgtaggcggtttattgctgctggcaaccggattacgcatctgtggcattaaaatgttcccggtggtcaacatgcttccagcactccttctggcaatgccgctttccgccgcctggaccgcctggtttgcctgacaatgcgtgcaatatcggcaaagtgatgatagattgtgcagtctgcagtaaattgaagaaatttgattgacgagacgaggcgaatcaggtttaatgcgccccgttgcccggatagctcagtcggtagagcaggggattgaaaatccccgtgtccttggttcgattccgagtccgggcaccactaattcttaagaacccgcccacaaggcgggtttttgcttttggatctgacaataaccttcacgaaaaaaattagcttataaagtctgggggaattactctcgccacgttaacgagagtaattttattgatattaatctcctgatactttacccccgtccaaactccagccgctgcacattcaccatcccaggcttctcagcagcactgacatcaatttgtgtcacccgcagcgcatatttttcatccagtgcgtttaaccatttcagcaggtcattaaacaccacaggttctatccagacctgaatattctccccacgatcggctatccgcctgatgaccaccgagtgcgcggaagcactgtcactgatgacccgcgatacctgcgcaggcgttgttgtggcagattttcgcgctgcaataatatccggcgcggcgttcttcagtcgggtgttcatcgccaccagctgctgcaatattgtctcctgttgctcaatccgttcgctcaacggctgccagatgaggacgtaatatccgacgctaaacaggaacaccaccgctgccagtaacatgcccttttcacgcggagaacgccccgccaggtgttgtgccagccagtgttcgccacggcttaactggcgttcacgccattgctgaaaatagtgaataaatttatcgcgtaacatgttatttcctccgcaacgttacgccgccggaaaccgcatcaccctctttctgtaacgcgtcctgttgcacaacataatcggttgccagtacactacgcagtttgtcgaaactggcaaagttcgcggcccgtagctggaggtgaagtatctggcgtttttgatcaaaggtaaaaccacgcatttcgatgtcggaaagtgacgctgatttcagggtgctggctatcgctgacaactcggcgagcagccgggtatcgtcggcctgtgggcgatattttttcagcgccatcgtcacctgagagcgtaaattcacaatccgcttctgctccgggaacaacgttaagaactgttcctccgcctgggtgcggctttgcgccacctgttcgctgacgctccataacgtcacgccccgctccactgccagcgcaaccagaatcagcaatatcggcagaatcatcacccgccagcgcgcccactgttttcggtagctgacgcgaggctgccacggccctgtcagcaggttcccttccggttcgccataagtggtaatggcgggcagagctgtaacggtcaggcgttcagcgtctgcgccagcccatgctgatagcttttccggtgcaatgccgactacggttagcgaaagcggtaaatcctgctcattgagctgggcgcggaacatgaccggagccagcgccagcccggcgctccatccccggcattcatcgatgcggcagataacccgttgcgcatcgcaagccataaacccacaaggaatggacatccagtccggcgcgacggtagcgcgggtgatgccgttttcctgcaaccactgcgcaatgttgcgcatatgctgttggtgaatcactgctacggttgccagttgctggtcgatattcaacggggcgaaatgcagttcatcgatatcctggttcagctcttcttccagtaaggcgggcagaatagtcggtagcgcagcgcgatggaaatgtcgtggcgcgcacccttgcgtaaaaccgtaagttgaatggaatccattgaaggtaactgccgcatcagagcaatcattgctcgtggatcagtgaaatcctgctgatttagcgcaatggcgatatcgccttccttgaaaccgctggcatcgaacagagaacgatctgcccccggcttcgctgcataaccgacaatcccctccttacgcacaggcgtaagctggatatagttaaaaattttctgcggatctttcgccagtgcctgacgcacggcagccgggatctcaactggcacactgacagcaggctcagcaacagcttgctttgcttcgtcactgacggcttttttgttggtcacagcaacagtggaacgttcctcttctgccagactcagacgctctatttttccctgataacgcagcatcacatggtcgcggttgatttcctcaatcaccgcgttgtgagagccaagcgtttcaccctgcaaatagacctgctgtttaccgccttcttcaataaccgcgccgggtctggcaccaaaggcgatcccacgcagcaccacattaagacgcgtttctgccacaggcacaggttcgggttgttttacctgcgcggcgacaggctgatatttgccaaaccagttttgctggctgattaattgcacgtcatttttatcgaacgtttttgcatccacacggctcggtttattcaccggttgagaaaccgccgtatattccgcagaaaaggagatatagcgccagagtgaatgcgccatttttgcagaaataataagcagcatcagccagaacatcccgcgtgcaatttttcgcagatgctctttgtctgtattaagagattgtctctggttaagagtgtgacgaatttttgtcagccattgaatgagataaattcgtgcgtcacgaaaaacaacccgcgccaatttatatctacccgacgttatgctttgactattccacaggtggtacgatccagtttccgctgatactggttacctgtacgtgtatcattaatcgttatgctgtaattaattccctcagtgatcattaatttcaccgtcgggtcagcgcacatttgtcgttgatagctggttaaaaaggcgtcaggcgtctgcgtggtttgtgtacccgcttcgctgataatggtcatttttaccgttgtgccgctactttgcgccagcactaaggtatatcccgcagatttaatcggcaggttttggctgatattttgcgcctgttttttcgccagtaaactggcattttcattatggctggcacagccacttaataatcctgtaacgctcaacaatagcgatattaataccctccctggcatttgttttatcgacatggtaaataatctctaaggttattaataagagttaaaatgtcactttgataatgacgtggttatcattaaaacaatgcctgtagataaagtgttgctataccgcccagacttaaacacggtccaaaaggcagtgtggttgatcctctttttgtaataacggcatatatcaggccgcagcatgaggcgattaaagcaacattgggcagcgacaatgcccccacccagccacctaacgcggcgaaaagtaatacatcgcccatgcctaatgcttctttacgcagaactattccggctatccaacgcagagagtaaaaagtgataaatcccaccaggacgccggtgactgcatcttgtagcgtgagcggactctgctgcgcccatgccgcaatcagtcctgtccacaatacgccctgagtaaaaacatcgggcagccattggtgatcgaggtcgatgacactcgcggcaatcagccaggcggataatatcatcaccgccagcccccatccactttctggccagaccagactcgccagcaaaaaagcaagtgctgtcaataactccaccagcggataacgcttgctgattttcgcctgacagtcgcggcagcgccctttgagcatcagccaggagaacagcggaatattgtcacgtatccggatggtctgctgacaatgtgggcagtgcgaacgcggtagcgcaaggcttatttttgactgcgcactcgacatttcaccgtgaaactccgccatttgttggcgcagcatgattgggtaacgccaaatcaccacattcaaaaaactgccgatgatcaatcctccgacggttgccaggacgggcatcgccgtggggtattgctgaaaaacatcaaaaagcatggttaaaggttgtttgttgtaacttgctggatgcggcgtaaaacgccttatccgtcctacgggtgtctgccagcgcaaataatcgcggctttccccgtctgtaggcccgataagcaggcgcatcgggcaaatgtgttaacccggtgcgccttatttcatgccggatgcggcgcgagcgccttatccggcctacgggcttactcggcagacatcttatgctcggtaacctgattaatggtttccggtccctgttccggtttcggcagatcgagtgacgcgagcgtgttgtaagccgactggctcacaccgccctcgaagctcatctcgctcgcccccggcagctggtaagcattcgcgcccggattccatttcttaaagaactccgaaagatccgtctgggcgacccaggaggcacacagcatcagcgtgtccgctgcgttaccgttggattcagcacagtaattcttgccgccaaacttgtcattgctgacctcatcgccgcgtgctttacgatgcatcaactggaacaggttccagcctttcatcccttcacgctcgctgtaaaactctggcagaggagtgccatctggataccatttcttgatatcaaagtttttctctgcccattccttcagctgtgcgtacatcagcagacggtcacccgcaccgccgcgtgcccatgcctggttgttgctctcctccagatattccggtgcgacggtaatatcgtcagcgacacggttcatcttgccgagataacgatcctgcatgtacagcgccagcacgttgttagcgacttcagttgcacccggtacagtcaacggcgtttctgcggcgttatgaccgacttcatgccagatcagccagtcgttcagcggcgtcgtcggcagcgtggtgctgttcggcgagaagctgctgttcattaccggataacccgaatgcgcatcaccgatggagatctgcacatcgttggtgaaacgatgtttgtggcccggcaagtttttataggtaaacatccggtgcttaccgtcttcgctatcacggccgtagaagtcattcatcgagctggcaaaggtatccagatcgttagcgaattgctccagtccgccagtgtaattgctggcattcaggttcttcttcggtgtggtatagacgaaagcgtctgattccagctcacccagcggagccggtgagttcagatcgtttttccatgcgccgtctttatagaacggtgcttttaccacgccagtaaaggtgaagctggcagattcattggtagagctattgcccttgatataaatcaggccaccgtaaggcaccttgaacttcaccgtaccgctagcgtccagagagtacgttttagtcactcttggcggacggttcagcgcaacttcatgcttctcacgtccggtcaggtcgtcagccagcgccacggtgacggtcacaggaacgttcgcattggacttaatggtgacctctttctgagccggtgcccacaggccagttgactgcatgttacctgcaaaccatttggtcggattcgagtacaggctgatggtttcagtaacgttctgtccctcttccgatactgctcccggatacttctcgacatcaactttgatgttcagatcccaccaggaacggcccagcatcaggcgtgtcagcggtttttccatatagttgagcgggtagctcgggttcatcatgcccgctttgctgctaccgtcaccgtagatcatgttgttatcgaccagcgattttttcagatctgcagaacacttggtgccgcctgcataggcatcattggcgtagcagttcaggaactcggtgaacgttttaaagcccagctcgtcatttttgccttcttcataacgatagctcgtatcgttccacagccagaccgacatgttctggtacagacgttccagatcgacgctgctcagacgctcacctttgcgaccattggtccggaagtagagctcatgctgatacagacgctgaatgttggtgcctaaatccgcagcctgcaccatcgcttttgcagtgtcggcgttaaggcttagttgcgtatactgtggaacatacatgccaccagtaaccggaacccccgtgccaggacgatattccaggcagttgacctcatagtgatatgccggattagtacactctttcagccccgggaacgcggcgaaaattttctccttcgcagccttcagagaatcctctgttttatgatcggcctcatcaataaaggcataacgcgtttcctgtttgccatctacatcttccagccagctggcaacttccagcttcggtttgtcatcaggtttgttttctacctgatatttccacttaacttcccctgtcttactatcgatggtgtacggcagcgcaccatctacggcaggataacgttcatagacccaaatgcccgttgcgcgctgctgacgaacgcggttcggatacccttgcggatcgttatttactaccgacttgttcagtgccatcgacagacctgcggcatccaacagacgcacaaaaccagacgcgctctcttccttaagattgctcatcacgttttccatgatcagcaccgatccacctttgttcagataggcgatcagatcggtcacatcctgctgagtcagcttcggtttgctggtatctgcacgcagcgggattgcataaggatcgttacccacctgagtcacatattcaaagccgttaaggatcagcagcggcatttcctgcggatcgagatcgccatagctacttaaatgctcaacagagatgcccgcaaaatccggatggaagtcgaacgcagcgctgtttcctgtaacctgaccatgacgtttaaaatagacagtatccaggttggtgcctacggtcatgctggctttcgcgtccggcttccatttatcgtcggacagatagcgcagcacgttctccatgaagttcttcatgtcatccgggtcgctgttgagcgtacactgcccatctttattaacgcccccgttccagctgtaaccgttcgggcaacgcaaaatgctgttgtagtgtgggttaccgataaccatcagtttgccctcaccgacttgccccagcgaaataaacggcaggttaaaggtggcggtatcgcgcgtaacgttttccggctcaacaagagaaggcgcttccgtaatgtacgccagctcgtttttatcccaggcgcgtttttcgccgaaggccagccagtagtttttatcattacgcgccatcagaatcgggaaggccgcgttggagatattcaccaccgcctgaccgcgcgcattacccgtgctgccatagaagttggtggagtcatggaatacatggaacttgctgacagatttgtagttcgtatccacgccccacagcttgttgataacgccctgaatctggccgtcattaacattgcgcgtcgtcagcgagaaccagcgagcctcgttacaaccatcggttttcgcacaaatcgcggtatcgatctctttggcctgacccgtattaaactgctcaataaattcgttaggcagattaacgacttgctcaccttcccccagcgtcgcaccgttggataacgagagattgataatctcgttgatcacgttgggatattcggcaaagaccttgcgtacatcgtccggaacaacacgggtattattttgcccggtcgtcgaatagcgatgaataagctgatcaatattcgccccgcgaacttcatcacccagttcagtcagcgcaatggtcgacttattgccgcgcactgaacccagttcaaaggtatcgataccaaaggagatggtttcgccccagctaaaggaaaattcaccattttcccctgtcacgccacggcctgaattggtgtagtagttgacgccagcaacaccatatccctggctatcgaccagtcgaccttcagagagaatgatttcagtgggttgatactgataaaactgttccgcgttagccgacacgaaggaagcgttcagatccggttttgttcccggcgtggtgacgggcacgaccggtgaagtatgagtggatggcgctttatcggtcgcagcattgttttccacctcttcattgaccagctttttgaactcttccggtgccagatcgatttgcttatacagcgagtcgaagcgtttactctcgatcaccgaggagaacgtcagacaaacctgttctgtattcgccggacagctgttactggacgttaccagcgaaaccgcattgcttttcttgtcatcggagcccgccagttcttgcgcgtcctcaaggctaaacgacactttttcaaccgcacgcaagctacgcgcagcttctgactgagtgttgaaggtggcaattgtcgtgttacccgccacgcaagtaacgtcctcgccaggtttaaatgtaaagccatcgctggattcaccattacaggtagcaccagttacccgctggcttccgcccagggtcagataacccgttttcgtaggaacaggttctggctccggttctggtgttggttcaggatcaggtatcggttctggcgtaggctctgggtccggcgttggctcaggcgtcggctccgggtttggtgttggatcaggtttcacttccggcaaagaccctgttccagaatctacaggcggcgtatcggaggaagatccggaaccaccgccatcacaaccggctaacagggttgcgctcaaaatagccgctaaaagcgatttcttatatttaaatttcttattcattaataacgcaagtgacaaaacaatgttaaaaaattcgtaactgggagaaatagttttatgctttatcttctctaataacttcctccattcttaagaaaacgacatcattgatagaaaacaggtgaaatttataagaataacccctatacgatgtctatctggctatttttacgaaatttcaacaaacaaaaaattaacaacatttcacaacgtaactatataaatttgttggtagttttaacgattaagattgcaaaagcaacagatagaacggtgtttgctcatcaagcgaacataattaatacagacttgttttgcgtgataaaaaaatagatgttctcacgctcttaattatttagcaggttatctgaacgcaaaacattattgctgcatggataataaagcgagaaatgattttcaattaataagacagaataatgtaaatgaagccggatgatattaacgatcatccggctttattgatttacgagactaacatcccggtaaacacatacgcctgcagcagggtgataatgccgataacgctggcaaaaatcagactgtgcttcacggtgtagcggaacagttcagattctcggcccaccatgcccgtcgcggcgcaggccacggcgatagattgcggggagatcatcttgccagttacgccgccgctggtgtttgctgccaccagcagggtgtcagagacgttgatttgctgcgccgtggtcgattgcagtgaaccaaacagggcgttagaggaggtgtccgagccggtaaggaatacgcccagccagccgagaaacggtgagaagaacgggaacatcacgcctgtacctgccagtaccagcgccagcgtggtggacatgccagaatagttggtgacgaaggcgaacgccagcaccatgccaatcgacagtatcggccacttcaagctaattagcgtttcggcaaagacgccaatacctttcttgatccccacaccgaggatgaagatagagataatcgccgcaataaaaatagcggtgccgccagccgagagggggtcgaatttaaacaccgcatccattggcgttggttgggcgacaatgggtgccgctttcaacacttgttgatgcaaatgagggatctggaaattaatcaccagtgaataaaacgcgccgcccggagcaaataacgctttaaacggcttcatggtccagatggtgaccagcaccgttaagattaaaaacggtgaccacgctcgaatgatttgccccagactatattctgaaggcacgggaccgccagaagatggcttatttaccaccatcgcacctgcggattgtcccatgctgattgccgtttcggtatttttcggccgccagactttaaggaataaagcgagtgagacgatactcaccagcgccgaagtaatatccggcagttccggaccaatatagttagaggtaaagaactgagtgacagcgaagcttcccccagcaaccagcgccgctggccacgtctctttcacccctttccagccgtccatcattgctaccagccagaacggcacaagaaccgacaggaacggtaactgacgtcccgccattgcgccaatgtggaacggatcgattcccgttacctgaccggcgaccagaatcggcacgcccaacgcaccaaacgccaccggcgcagtattggcaatcagacacagccccgccgcgtataacggtttgaagcccaggcccaccagcagcgcaccggtaatcgccaccggcgcaccaaagccagccgctccttccagcaacgcaccaaaggagaaaccaatcagtaacacctgcaaacgctgatcgtcggtgatggagataaccgagctgcggataatatcgaactgcccgctggcaacggttaatttatacaggaacaccgccgcgacaataatccacgctattggccataatccataaataaagccatagcccgcagcagcaaatgccatatcaatcggcattttaaaggcgaatattgcaatcaggatagataatataagggttattgctccagcgacatgtcctttcagacgtaataccgcgagtgcaacgaagaagaatattatcgggatcagggcgaccagagcggatagccccagtcctcccatcggcatatacatttgggtccaggtaaccatattgttcagtctcttattatctttatatgcttgatatacttaaggttgtaataagcaaaagaggactgaactgtaaaatataggcgttatactttacagcaacagtacgccgctaacgcaattgctacctctggcataacaagtatatcgggtaagggtttctgttccgcacacgcagacgcagagtatcgttaagatgtccatattgttgttttaggcccgctagtaatgcgctacgggtatttaatattgttaaaccctgataatcgctccggttatttccgggataaatgtactaccgcagttactatcatagccccgacaataaaacttgccggggcttttttgacgctattaatgactttctttttcgcgtaaacgccaggcgtgtaataacggttcggtatagccgtttggctgtttcacgccgaggaagattaaatcgctggcagctttaaaagcacacgagttagcgaaattccccgccatcggacgataagccggatcgccagcgttttgctgatcaaccactttcgccatattctccagcgacgcctgcacctgttctttggtcagaataccgtgacgtaaccagttggcgatatgctggctggagatacgcagcgttgcgcggtcttccatcaacgccacattgtgaatatccggcacttttgaacaaccaatcccctgctccacccagcgcaccacgtaccccagaatcccctgcacgttgttatccagctcttgttggatctcttgcgccgaccagttagcgttttcagcaaccggaatagtcagcagatcgtccagcagcggttcaaattcagcattgaactcggtctgggcaatgttggcttgtacgctctgtacgttggtttggtggtagtgcagcgcatggagcgtagcagcggttggtgacggaacccaggctgtgtttgccccggcacgcagttggtcgcccttctggctgtacatgtctgccatcaggtccggcattgcccacatgcctttaccaatttgcgctttaccgcgcagcccacagaacagaccggaaagcacgttattacgctcgtaggctttgatccaaggcgtcgatttcatctgatttttacgcagcatcgggccagcttccatcaccgaatgcatttcatcgccggtacggtcgaggaaaccggtattgatgaacgccacgcggttgcgcgcctgagcgatacagctacgcaagttcagcgaggtccgacgttcttcatccataatgcccattttcagggtattcggtgccataccgagcattgtctcaatgcgggtaaacagtttgttggcgaacgccacttcctgcggaccgtgcattttcggtttcacaatatagacgctgccagtgcgcgagtttttctgcacttttaaatcatagagggcaatcgcgccagtcatgacgccatcaagaatgccttccgggatttcattgccttcgctgtcccaaatcacaggaatggtcatcaaatgacccacgttgcggataaacagcagcgagcgtccgtgcagagaaatttcagagccatcggcggcggtgtaatgacgatcgtcattcagtttacgcacgatttgccgaccgtttttctccattttctcttgcagagtcccctgcatcaggcccagcaggttgcggtacagcaggattttatcttccgcatcaaccgccgcgaccgaatcttcgcagtcgagaatggtactgatagcagcttcgacgataacatcgttgatgtgcgccggatcgtctttgccaatccgcccattggcatcgatttgcagctcaatatgcaggccgttatttttcagcaaaatgcaggtcggcgcagcggcatcgccacggtaaccgacaaactgtgctggagtacgtaacgtggtttctttaccatttttcaactggatgcgtaattgtttatcaaccaccttaaacgccaccacatcctgatagctgccgttttccagcggtagagattcatcgaggaaacgccgaacccaggcgataacctgctcaccgcgttgcggatcgtagccgctgaccatcgccccttcctgcgggatgatgtcgctgccgtataacgcatcgtacagtgagccccagcgagcgttcgccgcgttcagcgcgtagcgggcgttcattgccggaaccaccagctgcggccccgcctggctggtgatttcgctgtcaatgcccgtggtttccaccgtcacgcgctccggttgcggcaccaggtagcccagttcacgcaggaaagatttataggccgctttatcttttaccggccccggattgctgcgatgccactcatcaagcgctgcctgaatgcgatcgcgttctgccagcaactgacgattttctggtgccagatcatgaacgatctcatcaaaattgcgccagaacgccgcagcgtccagccctgttcccggtaaaacttcttcatccacaaaacgtttaaaattggcgtcaatgcgtaaacggctctgggttatggtttgactcattgtttatctcctcgttttcgcttatttcgccaacaccgctgctgccgctttcgcgacctgcgcatcctgtgctccggttaaaccagaaacgcccacggcaccaataatttgcccatccacaacaaccggtacgccgccttccagcgacgttaataacggcgcagtcacgaacgcggtacgtccgttgttcaccatctcttcatagcccttagtttcacgacgccccagcgcggcggtacgcgctttctcctgggagatataagccgcaatcggcgcgcaatcgtccatgcgacttaacgccagcagatgaccgccgtcatcggcaacagcaatggaaacagaccagttatttttctgcgcctcttcctgacctgcggcaataattgcactcgccatttgctggctaagaatgactttagttttcattttgttattccttttcaagggcttgttctacaatttcaatccagtgacgcacagaggtacgaccggcgctcgccagatgcgtctggcaaccaatgttggcggtgacgatcatttccggtttgccgctttccagcgcattcattttgttatcccgcagctggcgtgccagatcgggatgcgttaacgcatatgttcccgctgaaccgcagcacagatggctgtcgggaacgtccgttaaggtaaatccaagacgaagcaacactttttccacttcgccgttcagcttttgcgcatgttgtagggtacacggacagtggaaggccagctttttatcgccgcgaattgccagtttttccagcggttcctcgcgcagaagttcgactaaatcgaccgccagttcactgacctgacgtgctttatcggcatataacgcatcgtttttcagcatctgcccatactctttgacaaacgcgccgcagccgctggcggtttgcaaaattgcctcggcacctgcttcaatcgcgggccaccaggcatcaatattattgcgcgcccgtgccagccctttctcctgcgcattaagatgatagtccaccgcgccacaacagcctgcttcgttagctggcatgacgctgatccccagacgatccagcactcgcgcagttgccgcgttggtgttgggcgaaagcgtaggctgggcgcagccttccaacattaaaacccgacgcttatggcgcagcggcggacgcggtttagctttcaccgtttcagcaggcagttttgctctgacctgttccggtaaaaacggtcgcagcaccagccctacctgcgtcagcgcacggaagaccgccggacgcggcactacctggcgcaatccttcgcgcagtattcgctccggcagtgggcgtttcactttctgctcgacaatatcacgcccgatatccagcaaattgtgatagcgcacaccagaaggacaggtggtttcacaattacggcaagtgaggcagcgatcgagatgctcctgtgttttaagcgtgacttcgttgccttccagcacctgtttaatcagatagatgcgcccgcgcggcccgtccagttcatcgcccagaagctgataggttgggcaggttgcggtacaaaatccgcagtgaacacaggcgcgcaggatgctgtcggcttccagcgcgcgcgcgttctgccgcatctcttcagttaattgggtttgcatagcctgctcctcaaagttccgcgtacatgcgaccggggttaaacacgccgcaagggtcgagctgctgtttaagctgctggtgatagcggaataaaggagccgatagcggggcaaagccaccatctccggcactaaagcgggtcgcatgaccgccagcgttgcgggcgatgcgatggatttgattgtcctcggctgtcgatttcagccagcgtaacgccccgccccagtcgatcagttgctcgccgggtaaatccatcatcggcgcatcactgggtaatgaaatgcgccataaggtacctggtaacgagaagaacggcagttgttgttcacgcaattgctgccagaactgaccggcaacctcttcgccacccagcagttcacgcgctgcttttaccgatccttcgccgccctcaaggcggatccacaacgcattgtcgaagtaacataagccactaatgggtaatggctggagttgccactcggcgatttcactcatggcttcttgcaggctgatttcccgacgcaggctcagggaggcgcgcggtcgcggtaacactttcattgagatttcagtgagcacgccaagacaaccgtagcttccgaccattaaccgtgagagatcgtatccggcaacgtttttcatcacttcgccaccaaaacgcagatgttttccagcgccggtaatgatgcgcgtgccgaggacaaaatcgcggaccgaaccgctccacgggcgacgcggccccgccagcccgcaggcgaccatcccgccccaggtggcttcttcaccataatgcggcggctcacaggggagcatttgccccgcgctttccagcgccgcttcaattgtcaccagcggcgttccgacacgcgcggttatcaccagctcggtcgggtcgtaattaacaatgccgcgatgacaacgaacatccagcgtttgcccggtgacagggcgacctaaaaaggctttgctattgctgccctgaatcaccagcggcgttttatcgctaatcgcctgattcacctgctccagcagcgcctggctgtaatcacactcgcgtagcatcagaaacgctccagttcagggaaaggtaaatgaccgtgatgcacatgcatggcaccaaattcagcacagcggtgtagcgtgggaatgtttttcccagggttcagcaaaccatcggggtcaaacgccgccttgaccgcatggaaggtcgtgatttcatcgctgttgaactgggcgcacatttgattgattttttctcgcccgatgccatgttcgccactgatgctgccgccaacttcaacgcagagttcgaggatcttcccgcccagctcttccgcgcgggcaaattcaccgggttcgttggcatcgaaaaggattaacgggtgcatgttgccatctccggcatgaaagacgttggcaacacgtaaatcatattgctgcgataaacgggcaatgccttccagtacgccaggcagggcgcgacgcgggatggtgccatccatgcagtagtaatccggggagatacgtcctaccgccgggaacgcatttttgcgaccggcccagaaacgtacgcgctctgcttcgtcctgtgccagacggacgtcagtcgcgcccgctttcaacaagatgtcgttaacccgctcgcagtcttcctgtacgtcagactccacgccgtccagctcgcataacaaaatcgcttcggcgtcgacgggataaccggcatgaataaaatcttccgccgcgcggatcgacaggttatccatcatctccagcccgccggggataatgccattggcgatgatgtcaccaaccgcaagtccggctttttctaccgagtcaaagctggctaacagaacccgcgccacgggcggcttcggcagcagttttaccgtcacttcggtggtcacgccgagcataccttccgatccggtgaacagcgccagcaggtcaaaaccaggtgaatccagcgcgtccgatccaagcgtcagtgcctcgccgtccagcgtttgcacttcaattttcagcaggttatgtacggtcagaccatatttcaggcagtggacgccgccggcattttcagccacattgccgccaatggaacaggcgatttgtgaggaagggtccggtgcgtagtagagattatgcggtgcaacggcctgggagatcgccaggttacgcacgcctggctgcacgcgcgcgcggcgaccaacggggttaatgtcgaggatctctttaaagcgcgccatcaccaacaacacacctttttccagcggcagcgcgccaccagaaagcccggtgcctgcaccacgggtcaccaccggtacacgcaggcgatggcagacagccagaatcgctgtcacctgttccatttgcttaggcagaacaaccagtaatggacgcgtgcgatacgcgctcaacccgtcacactcgtaaggaatgatctcctcatcggtatgcaggatctcaagtccagggacatgctcacgcagtgccatcagtaccgatgtgcggtcgacatcgggtaaagcgccatcaagacgctcttcgtacaagatgctcatgagtaggcttcgctttgttgtgttgtgtggcagctgatttttgcgcgctgcttctgtgaacagttattaagcgggcttttcgttttcgtctatctctttagctaccggtcagaccattttttttccagctctgtgaccttgtcttggttaactcaatgttaaattgatgtaacataatcacttacgtgatgtgcgtgttttgcgagttaagaacagaaaaattggtcctacctgtgcacgaggtccgggaatgaaagatgaacgtcgccctatttgcgaagtggttgcagagagtatcgaacggttaattatcgacggcgtactgaaggtcggtcagccgcttccctcggaacgtcgactgtgtgaaaagctcggcttctcacgctccgcactgcgtgaagggctgaccgtgctgcgcgggcgcgggattattgaaacggcgcagggtcgcgattctcgtgtcgcacggcttaatcgggtgcaggacaccagcccgctgatccatctgttcagtacgcagccgcgaacgctgtacgatctgctcgacgttcgcgcattactggagggcgaatcggcaaggctggcggcaacgctgggaacgcaggctgattttgttgtgataacccgctgttatgaaaaaatgctcgccgccagtgagaacaacaaagagatttcgctgatcgaacatgcgcagttggatcacgctttccatctcgccatttgtcaggcttctcacaatcaggtgctggtgtttacgctgcaatcattgaccgatctgatgtttaattcagtgtttgccagcgtaaataatctctaccatcgaccacagcaaaaaaagcagatcgatcgccagcatgcgcggatctacaacgcggtgttgcagcggctgccgcacgtcgcccagcgcgcagcacgcgatcatgtgcggaccgtgaaaaagaatctccacgatatcgagctggaaggccaccatttgattcgctcggcggtgccgctggagatgaacctgagttagctggtattaaatctgcttttcatacaatcggtaacgcttgtacggctccgccccaatgcgttccagcatgttattcatgcctgtattggtttcgaggatccatgacatctccagcgcatcgatcttccggcgggcaaacggatcgcgtaaggcttcaatcaataacagcgcaatcaccgggccgatgcggctgaactgatactcgtcgcgcacgcccatcagcggtactcgcgcagttcgcacaccgctgactttcaaacgccacagcaattttgcccagccgaagggaaagagcgatccgttcagatcggcaatcgcctcgttgatgttcggcaagccgacaataaacgcgcagggtgcagaatcaatctcagcgatatagatcatatcgtccggcaccagatatttaagttgatcgcccatggtcgcgaattcatgttcggtaaacggcacaaatccccagttgtgctgccagccagagttgaaaatctcacgcaggatctgcatctcttcggcaaaccgctgacgattgatgcagcgaatggtcacctttttgcgcacctgatccatcagtttttttagcgccggagagaaagtgagatcggttcgctgcatccaccacgccagtaaatcaatgcctttgtgataacccagttgttcaatatgcgcggcataccacggtttgccgtgtggcatcatcgcacagggtggtgtgtcaaaaccttcaatcagtaatccgctttcctgattgatattcaggctgaaaggaccgctgatcttacttgcaccttgtgacttcaaccacgcttccgctgcgccaaacaacgcggcaaaaacctgcggatcatcaatggcgtcaatcatgccgaaatgaccggtatctttgccgtaacgctcgcggtgcaaggtatctatttgcgcggtaatacgcccaactatctgccccgctttttttgccacccacgcctgccagatgatatggtccgtccccggatttttcgcagacaaatgctcgttgcgttcaatgaataaagggggtatccagtttggatcgtcgggataaagtgatgacggaaaagcgataaatgccttaaggtcatttttattaaggaaggtgcgaacaagtccctgatatgagatcatgtttgtcatctggagccatagaacagggttcatcatgagtcatcaacttaccttcgccgacagtgaattcagcagtaagcgccgtcagaccagaaaagagattttcttgtcccgcatggagcagattctgccatggcaaaacatggtggaagtcatcgagccgttttaccccaaggctggtaatggccggcgaccttatccgctggaaaccatgctacgcattcactgcatgcagcattggtacaacctgagcgatggcgcgatggaagatgctctgtacgaaatcgcctccatgcgtctgtttgcccggttatccctggatagcgccttgccggaccgcaccaccatcatgaatttccgccacctgctggagcagcatcaactggcccgccaattgttcaagaccatcaatcgctggctggccgaagcaggcgtcatgatgactcaaggcaccttggtcgatgccaccatcattgaggcacccagctcgaccaagaacaaagagcagcaacgcgatccggagatgcatcagaccaagaaaggcaatcagtggcactttggcatgaaggcccacattggtgtcgatgccaagagtggcctgacccacagcctggtcaccaccgcggccaacgagcatgacctcaatcagctgggtaatctgctgcatggagaggagcaatttgtctcagccgatgccggctaccaaggggcgccacagcgcgaggagctggccgaggtggatgtggactggctgatcgccgagcgccccggcaaggtaagaaccttgaaacagcatccacgcaagaacaaaacggccatcaacatcgaatacatgaaagccagcatccgggccagggtggagcacccatttcgcatcatcaagcgacagttcggcttcgtgaaagccagatacaaggggttgctgaaaaacgataaccaactggcgatgttattcacgctggccaacctgtttcgggcggaccaaatgatacgtcagtgggagagatctcactaaaaactggggataacgccttaaatggcgaagaaacggtctaaataggctgattcaaggcatttacgggagaaaaaatcggctcaaacatgaagaaatgaaatgactgagtcagccgagaagaatttccccgcttattcgcaccttccctaaatcaggtcatacgcttcgagatacttaacgccaaacaccagcgaaatgagcggcttgccgacgatcaacaccgcgagcgccaccagaataccgattccgcccgccagtaaaccggacttcacacctaacaaccacggtctggtggtgcgcggatctaaacgcatcacctctgggtaaaaacttttacccagcaaacccgctggcgttccggcggcgtcgaagaatgtcatggcgattttaaataacccggcggcagcgggtcctaacacgatccccaccaacactgtgctgcacgagttacgcgccgaccagatggagtgggcaatgttggttgaccagacaaaactccacgcgcctttaatgtatcgggcagactcaaacagattcaatttgaaggcgttatggatatttcggcggcgtaattcgcgcgcggcaaaccaccagtacatggtgccgccaaccagattcgacacgtaccaggcaataacaaaacccgcaaaaccaaagtcaaaataccaggctacgacgctccccgctgcgcgcagaaaaggtttcgtcgcctgctgtacagcaattaaatcgaagcgatctaccgcacgcagaatgccggtcggcgtggaggaagccattgaaggaatgagcgtgcaatagagcgctgccagccaaaaactttggtcatccagacctaatgaatgggaaaggaatggcagtaaggcaatgccaccgacaatcgccaccgcgccgctgacgatatccagcgagaaggaaaatgagacgacattgcggaattgctgcggattattgttggttaatgctggtgttccgtactgaaccaccagttgccatgtctgaaacttaataaaatcgctgatcgacttggcgtacgattgcacaatcaccagtacgccaaacatggcgggcgtcatccctttaccggcacacgagagcgccaacagacccagcaaggcgctcacgacattactggagcctaaccaggcgctattgcgaataatggtgcgaaacgcgccatctgcaaaccaatgtttgatgttaaaacccgccaattcagcctgaccttatcgttgatagtaaaaagtatcccgccagccttaagttaaacttcggcggtcagaaacgatggcaaccagagaaaccgccttctgtgcctgttccagcacttcgctgtagggcgctctggaatcaatctcaagaatttttgtgccgttatagccaatcttcgacatgacaccgattttgtcctgcagctcggcatagtcatggtcaggcttgcgggagatggcagtctcaatatcaatgcccaggcgaataattaattccgggcgatattgcgccatttgttggtataaacgccgttcgcgctgcgccagaaacatgctgattttcccggtcgcacgttcgacgccaatccccggtccatcataataaaagcccgaaatttcagcctgcgggaagcgatcgctgaccaccagaacgccactttgcgccagtcgctgaaccttgcgtagattcgccattcttcgcagcgagaagcagtacataatcaccgccgcccatagcgccggagatttggttttcatgctttgggttttcgaggatttggccgccagtcgccgttccagccagacgccaaccaacggcaatcgtttgattttgtcgccgtcttcgccggagagcagccccagatagcgccgctcggtttgccagtgttgttgcagcgatttcaccaggtcggtggtcagtgtggatttaccggtgccatcacacccgaccaccgcaatcagccccggaatgtagttgggctgcggcgcggttgtactattaacagtttgagtttgtagtgcatccattcgttaaatcatcccctatccattttggtgatcaggaaagcgcggcgtgaattgcgcgtagtgacgcttgcagaatttcatcggcggggtgtcgcccatccagttcaaggatctttgcgccattgaatgtcagttgcggcgtaacggcgattttttcctgtaacgctgccagttggtggtcaggtttacgcgcaaacgcggtttgttcatcaatgccaagacgaatcaacaatacgggcaaataagatgccatccattggtacagcttcagctcgcgctgccttaacatttttatccaaccgttaccgcccgtggtttttgccaattgcgggccatcaaagcgaaaccccggcacttcaacctgcgggtagcggtcggtgatgagcagaaagccttgctggcttttacacaacattttgcgaaacttgtacgcccgccagcaggaaagcagatagataaccagtgcagtaatattgccaggcggtgttgagggcttttcgtgcacatgtgccgctttacttcgcagataacgcccaaaaggtgcgccaataacagggagctgtgaaatccattcgccaattcgcccggacgattgcccgagataaatgtgttctgttggcattcttgctgccagttcatttaccaggcttgccgtgagggtcgatttacctgaaccatcacatcctacaatggcaataacacgcactggcgtggaattaattattgacatattacgttgattcacgaaaaacccggcagtaaataatgtattgaatattacgtggtccgtgctcagaatatccgttcaaccttattgtgacaatggttaattgtgacattgacctgaattacgctttcataaaaacatattaaccaaataaatatttttaatggatatttaaattaaaggatatattcatgcagtcaataacacctccattaattgccgttattggtagcgatggttcaggcaagtcaacggtgtgtgaacatcttattaccgttgtcgaaaaatatggtgctgccgaaagagttcatttaggaaaacaggccggaaatgtcggtcgtgcagtgacaaaattaccgttgatgggaaaatccttacataaaacaattgaacgaaatcaggtgaaaacagcaaaaaaattgcctggaccagttccggcgctggtaattacagcgtttgtcgcccgtcgcttactgcgctttcgtcatatgcttgcctgtcgtcgtcgcgggttaattgttctaaccgaccgttatcctcaggaccaaattcctggcgcttacgatggtacggtgttcccacctaacgttgaaggtggtcgttttgtctcatggctggcaagccaggaacgtaaagcgtttcactggatggcgagccataagcctgatctggtcatcaaactcaatgttgaccttgaagttgcctgtgcacgtaaacccgaccataaacgggaatcgctggcgaggaagattgccataacgccacagttaacctttggtggtgcacaactggttgatatcgatgccaatcagccactggaacaggtgttggttgatgcagaaaaagcgattacggattttatgaccgcgcgtggttatcactagtcaaaaatggaaatgcccgatcgccaggaccgggcattttcaggaaggttaaatcaactgcaatgctatccagtacagcccaccagaaagaaaaattgccgccggtaaagtaaatacccacgccatcaggatgctggttaccgttttacgctgtaacccaccgccgtccaccaccatcgtccctgcaactgcagacgagaggacgtgtgttgtggagacgggcatcccaatataactggcaagaccgatagacactgccgccgtcatttgtgccgccatgccttgcgcatacgtcatgccgcgcttaccaatcttctcaccgatggtcatcgctacacgacgccagccaatcatggtgccaatgccgagcgccagtgctaccgccatgatgatccacaccggagcgtactcaatggtgcttaacatatcgctgcgaagttttttcagcaggttctggtcttctttactgacgcctggcagtttcgctagcttcgcggaggtatcagagatgcacagcataatgcggcgcagctggctgcgctgactcacgcttaacggctcgtaactttccatattgcctggcagcatcgttttaacgcgcgcaatagcatcaaaggtatttgccggatgacagtgaaactctgttacttgcgtgccatcagtcgatgctgcaggcaatggaggttccatcgcaatcaacttctgcggcagttcaggatgctgttgcaggtagtgttcgaagttggtaacggcatcgcgggtacgggtaatttcatagccggacgcattcatattgacgacgaagccagcaggggcaatccccaccagtaccagcattaccaggccgatccctttttgtccgtcgttcgcgccgtgcgaaaacgccacgcccgcagcggaaacaatcagcgcaatacgcgtccagaatggcggtttacgtttgccttttttctttttgcgatcttccggaatgcggtgaatacggtcacgctttttcgtcccgctccagtagcgtcgcagcaggaatatcaggcctcccgcaatgaccaggccgacgataggggaaacaatcagcgaggagaaaattttggtcacttcacgcaggtttaacgcatccatcaccgatgagccggttaacagcgcgttggttaaaccgatgccgataatcgcaccaatcaaggtgtgcgaactggaggccggtaaaccgaagaaccacgttcccaggttccagataatcgccgccagcagcatggaaaagaccatcgccaggccgtgggttgaccccatattcagcaacaaatcggttggcaacatatggacaatggcataggcaacgctaagtccgcccaataacacgccaaaaaagttaaaaaatgccgccatcaccacagcaagttgtggttgcatggcacgagtataaataacggctgccaccgcattcgccgtgtcatgaaaaccattgattgcttcgtagaacaacacaaatgccagagcaagcaataacaaaagccctgtgtatatatcaaggccaacaaataaatttagcatatattagattacgccattttgaatttacgaacggacgcattatcagtgactttaacggcatgggcaaagtgaaatatcattttttaacgataaaaagagtgttatttcttgtgtatcagacaataagcattcattcaaaacctttagaaataatcaaaacacaggtattccactggttaatatattcacatatgaaatgaataaatattggaatatataaatattgaatattttgattaatccccgtactgattattcttcataatcagtacggggttgctacaacatgtattactttttcaccacaattaacggttcaatatcactctcttttttgatgaccagtgattcatcaccgcgcaaacacgtcccaccgtagttgccgccaacggtgaaggtacatacctgaatgtatttaccgtccactttcggcaaacaccacagttgctgatagatgtttttctgctcggcaaatttaccgctggttttgtccagcacctcttcatgatggctgacgaggtcgatattgctgccacagcgaccggcgatcggtttcactgcgtaacctgttttcaccagttcatcattaacagtgaaatcggtatccagcaggtaacgatggtgcgggaacagcgaccagaggatcggcagaatcgctttgttgccggggatcaccgtccacagcggctcaaagaccagcacttccgggcgcagcaatacgtcgataagacgcacttcgttttgcggatgaccggtacggattggcaccgcagcaaactcacggtcgctaacttcacgaatctgatcaaacgcggtttcccacgcccaggttttccacacgcagttaaccagtcgcccttccccatcaatcagttgcccggcagcatcccagcccagttcatccaatccacgcaagatacgcgtttcaaagcccgcctggtgcagcgcctgctccataaactgcgcgtgatagttttcctcgatatctttgtcctgcatgatatggacaaacggacgtgcacgactgtgtttccaggcaccagccaattcgttaatcagcccttccgccggattgaagccgttgcctttatagccctgctccgcccaacgttcgaggatcaagcccgcttcggtatgacaggaggcggagtcggcgttgtactcgtaaaccttcaggccacgctcatccatgcagaaatccatacgaccagtgatcatatggtgacggcgacgctgccaggagagacgcaaacgtggccagaggattttcgggatgtcgaacagcgccagcaggttgtcatctttcagcaccttgtcggttgcgtgaagatacatcaggtgcagctcgttggtggctttaattagctcctgctcggcactctcggtaatggtgtagtaatgataaggatcctgattgatcacctgaccgttggcctgcacataggcgttttgcagcggatctttttcatccagccatttaccgtcaaactggcctttgttttccaggcgcgctccgctgattttcagcagctcgcctgcaatttccggctgcggtaagctgtattcagtatcttccgtctggatcatccagcccagaatggtggtgtcatcaaaagtgtctttcagggtatagcagccgttttcgaccaccatctccagctcgcgcgtccactgttgcccttgcggcaacggggaatgaatcacgttctgttccgcaatacggactttgttgccatgcaattgggtaatgatggcgacatggccagtgtctttaaattcaccgcctttatcccagataagaagcgcacccgcgaccggcgcacgcggcgagccgttaggaaatgcctgcaatggcaggatgttgtcattaaccacttctcgcaggaagcgcagcgagaaaatctcccacgccatacccacgtcagtaaagaccacaccgtaattcagaaagagaaaacggcgagcaaattcaacgcattgccacttgtggcccatatattcgtcgtcgatatagctacggaatacggcgtcatcttcgtattcctgcggatcgagagaactgtaatctgaagagtagattgctaccccacctggggcgtagcccaataatgtcccgaacggggcatcctggctggtcgttcctttgctcatcactttacctttaacaatacaacctaagcagttggcgtaattgttgtgctctgattacctgctcagcgacattaaccggacagaggtcagactaatcatacacctcatcgcagcggctggcgcaaagggttaaaaaattcacattctgtacagcaagtgacctgctacactgcttcaacactaccactcagaaggcaactcactatgacagacaatacttatcagcccgcgaaagtctggacgtgggataaatccgctggcggcgcgttcgccaatatcaatcgcccggtttctggtccgacgcatgaaaaaacgctgcccgttggcaaacacccattgcaactttattcgctgggaacgccgaacggtcagaaagtaacgattatgcttgaggagctgctggcgctgggcgttactggtgcagagtacgacgcctggctgattcgtattggcgatggcgatcaattctccagcggctttgtcgaagtgaacccaaactcgaagatcccggcgctgcgcgatcatacgcataatccgccgatccgcgtgtttgaatctggttcgatcctgctttatctggcggagaaatttggctacttcctgccgcaggatttggcaaagcgtactgaaacgatgaactggctgttctggttacagggcgcggcaccgttcctcggcggtggttttggtcacttttaccattacgcaccggtaaagattgagtacgccatcaaccgctttaccatggaagccaaacgtctgctcgacgtgctggataagcaactggcgcagcataagtttgttgcgggcgatgagtacaccattgcggatatggcgatttggccgtggtttggcaacgtggtgttaggtggtgtgtatgatgccgctgagtttcttgatgcgggcagttataagcatgtacaacgctgggcgaaagaagtaggcgaacgtccggcggtgaaacgtgggcgtattgttaaccgcaccaacggaccgctgaatgagcagttgcatgagcgccatgacgccagtgatttcgagacgaatacggaagataagcgtcaggggtaagggttggtgttcgtcgcagcaagccatccaggccggataaggcgttcacgccgcatccggcaatcgtgcacaatgcctgatgcgacgctgccgcgtcttatcaggcctacgaaagctaatcatcacgcgctggtaatgtcgtaatccatttggcgcagtgcgtctaatgtggctttggcttcatcttcgtcgatgatgctcatggcaaatccgacgtgtaccagcacccactggcccagtagatcggcagggttaccttcacaaatcagggcgatattcacatcgcgcttgataccacatacttcaacctgcgcaagctggtgaatatcttcaccgacagccagcacctggcctggaacgccaatacacattattaactccggttattcaacttcaatacttttgacgatcagcgaatcgccggtatcgacacgcaaccgctcgccgtgacagagcggacactgcgcatcgtgctgatgaatctccaccacctggctgcaatcccagcaccaagcctgggcgggtttatagacgatatgtaaatcgcacccttgcgccaccgttccgtggcagacaatttcaaaactaaaacggacggcgctctcctcaacgcaggagagcgcgccaatttccagccacacggcggtgacgcgcttaacatcgtgctgctccgcctgccgttggataatttcaacggcgctctggcaaagagacaactcatgcattttcgccactcctgcgaccaaacagcagggcgcgacgccctgcgtgtggtacatccggattcgtgactggcagcgaaaggatcattcgtgcgcagtcatccgtcaggcgttggccctcttcaatcgacatgctgtgcgaaagcggcgacatcagcgaacaggagagatattgcgaaacaccgtccagttcgccaacggtaaaggtcatagtgccatacggcagttgcagaccaattttttcactcactttgcgcagcggccagagttgatccgggccggggaagataactgcactcagcatccacggggtgatcacacaccccgtccactgaccttcgaacagcgtaaaatcagaaacatacaccggcattgaaggatgcagaaaagagagatcgtgcatcgaacgccgggcaatttcttcaaacgctgcctgtacttgcgccttcggggaggtctggaaacctgctatctcttcagtcatgaatcgcctcccgtgggatggcttccacgccagattcacgcagcgcagccagaacctgctcaagcgcaggttcaatcattgcttcaaccgtcggcgttaagccgatgtgtggctccagcgattccgggatcacgccgaccagggtcagctttttcggaaactcgccggtgaagcgcagggccgacaagacgtcggccaggccaagctgatgcggagagattttgttggtaaacaacgccggaacttcttcatcccgcaggatcatcatcgttcccggcgcgttctttttcgagacaatggcatccgcaataatcaaatgatcgcgatttgccatgtcgccaagcagctccattcccgccgtgccgccatcgaggatctcaacataatccggcagaatgtatcgttgctctaacgcttcgacaatccgcacaccgatggcttcatcggtcagcaaaatattgccgacccctaagactaaaatacgcattacagaaccttcactgaaaccacttcgttgccgtcagcatccactacgtgtaccgcacaggccatgcacgggtcaaaggagtgaatggtacgcaccacttccagcggtttattcggatcggcaaccggtgtacccaccagcgactgctcgtaaggaccgacgtcatcattgaagttacgcggaccagagttccaggttgatggaacaaccgcctggtagttgctgatgataccgtctttaataaccatccagtgagagagcataccgcgcggcgcttcgaggaagccaacacctttgaattcacccgttgccggaatgttcggcttcacaaaggtggtgtgatcgcctttgccgatattggtgatcagtgcactgtattggttttgcaggatatcctgcaattcacagcagtgaacggtacgaccaataatacggcccagcgtggagtgcagctgtgccacttccagcgtgttgccagtcagtttctgataaatcgcaacgatttcattcagtttgttctgggtagattcgcgacctgccgccagtttcaccagcatattagccagtggccccacttctaccgttttgccgtagaaagtcggtgatttcacccaggaatatttcccgtcgtcagaccaaccatcataagccggaatggtggtgccttcccacggtgcctgcggcgcttcgtctttataccaggagtgcttcgcgctttcctgaatgcctttgatcaggtattcatcggaatgagaagtgatcggacgatacgaggacagatccgcattctcaatgtagccgcccgggaacaggaagctgccgtttttactgtcggtcgggaattccggcacgctcaggtagttcaccgcacctttaccgcgtgtcagccattccgggtagaacgcggcaataactgcggtatcaaccttataaacctgctcaacaaagtcgctcagtttgtcgatgaaagacttgatgtacatcaggcgctcaaggttcagcacgcccaaaccgtcgaggttgatcgggttcgcgacaccacctaccgccaggttctgaatgtgcggcgttttaccgcccagcagcgccacgacgcggttagcgtcacgctggcactccaacgcttgcaggtagtgcgctaccgcaatcaggttcacttccggcggcagtttcatcgccggatgaccccagtagccattagcgaaaatacccaactgaccgctggcaaccagatctttgatcttgttctgaactttggtgaactcttccggactgttcaggtgccaggtcgaaacgcctttcagcatttcggaggctttggttgggtcagcttgcagtgcagaagtgatgtccacccagtccagcgccgaaagctgatagaaatgaacaatatggtcatgcgtggtgtgcgcagccagaatgatgttacggatgtattgcgcgttaaccggaacgtcgatattcagcgcactttctgccgcacgaacggaagacagcgcgtgagtggtagtacatacgccacagatacgttgcacaatcatccatgcatcgcgcggatcgcggtttttcacgatctcttccatgccgcgccacatggtaccggaagcccatgctttcgaaacgacgccattttcgatttcgcaatcgatgcgtaaatgcccctcaatacgggttaccggatcaatagtaattctctggctcatgctttgctcgcctcatgacgattatgatcgttttgttttaaaggaggaagtatcggcagtagacgaatgagtacgatgtaagcgcaaatctcaatagccacaaaaccaatagaaatcaacagttcttcccaggtcgggaagtaggcgtaaccgccgcccgggttgaatgccaccagcgaataggtcagacgccaggttgcacaacctaacagtgcgctcagtgctgacaggaacagcatgcgggaatcattacgcagcttcgccacacgcagaacgaccagcgggaagagcatcagcaggacttcaatccagaacatcacggagtagaagtcaccggcaaacgctaacgacagcttgtcgcgatagataagctcgccaaagcgcagcacgatgaaaatcgccagcaacacactgatggtgttggtcagcttaacaaacagactcttttcatccggaccgttgccacgcagacccgcctgcaccagcgaaccttcaaagatgacaatcgagaagcccatgatgaacgccgtcagcagcgagaacagcggcaacatttcatagctctgccacaacggatgcaccttgtagcccgccgagatcatcagcgaccccattgaagactggtgcatggtcggcagcagcgcaccgagcgcgatgatgaagaacatcaccttgtttagtcgctgtagcgacaccttccaccccagacgttcaaacagtgccggagcaaactccagtgccatcacgccgatatagatggtcatacagaccgccgtctcgaacagtaccgagttcacgttgaagtgacccggaatgtagaagtacggcaggttccagtagcgacccacgtcgatagtgatcgacaagccacccagtgagtaaccaaacagactcgccaacagcgccggacgcaccagcggatggtattgcccacggttaaagacgtataccgcccacgccagcgcccagccgccacaggcaaagccggtgccaatcagcaggtcaaacgcgatccacacgccccacgggaagccgccgttcaggtcagagacagagcccagaccgaacaccagacgcttcacaatcaggagcatacagatgacgattaacggtccaaaaatcatgaccggtttactgatgattttgccgcccagcggttgtggatcatgactcatgatcgtctcctccgtcgtgatggtcgtttttggtgttgcgacgaaccagcacggttaagcccgccagcacagccagtggtagcatcatgcctttatacagggtgtgttgaatattttcggaacgcgcaccggtagaaagatcgtccagtttcggcaggtcgagattttcataaggcacacccgtcagtaccagaacctgagtaccgccgccctctttctcgccgtacagatgcggataatatttcggcaccgtatgcaggtaagtgtcgccagatttcagcgtctgacgcggatagtggtattcgctgccaggcttcagcgccagacgttttttcgcctccgccatcagctcttcacgcgtaccgaaaatcaccgcgcccgccgggcacacttctacgcagccaggtagaccgcctttatcgagacgttccacacctttctggttgcacagctcgcacttatgcagcgcaccaaacgggttgttgtagtcgtacttcggcacgttgtacggacaggcgaccatgcagtaacggcagccggtgcacacatctttgtcgtaatggacaatgccggttttcggatcttttttcagtgcagagaccgggcacacagagacacagttcggatcgacgcagtgcatacactgtttcttaatgtacgcgtagccgttctcctcctggtctttgttgacccctgtgccgctggtccacacctgaatgatgttattggtatacggcgacagtttgtcgttgttcgaccaggtctgttccccttgcgggttacgttcagggaaattgatatcctgacacttggtgacgcaagcctggcagcctacgcacaaggtcgagtcgtacaacatccccagcgatcccggaattggcgggcggttttcagcagccgcatgactgacagacggcagcgcgcccgtcagcaatgccccgcaggaggctgctttaataaaattacgtctgttcacggttattctccccgtgagtcagcgttatctttcttttgctgacgacccagttcacgcaccgccatcacgctgacaccggcaaccaacccaaccacaccgccgagcaaaccaatagcgcctgcagagacgttgccgccctctttagcgttaacatccggtttctgtgaacgcggagtttgattttcgacgttggcaagctgatggatgcctttatggaagccgataccttcttcgttacagccatagcaagggtgaccaatcgccaccggccacacaccgccaacatcgcagaattgcagcgttgagcagttgccgtaagtttctggccctttacagccgaggtggtacaggcaccagccttcgcggtggccttcatcaccgaactctttggcaaaacgaccagcatcgaagtgcgggcgacgttcgcagtgttcgtgaatcagacggccataggcgaaggtcggacggtttttgtcatccagtttcggcggtttgccgtaagtgatgatgtgcgcaacggtcgcgaggaagttgtgcgggttcggcgggcagcccggaatattgataacggttttgcctggcagaacttcttgcaggctgactgcgccagttgggttaactccagctgcggcaacaccgccccacgcagagcaggaaccgatagcgataatggctgctgcgccttccgccgctttgcggatgtgatccacaatcggctcaccggcaaccatgcaataaataccgttatcttttaatgggatggaaccatccaccactaacacatactgccctttgtacttctcgagagcgttatgtttgttctcttcgacctgatgaccgaaggcggcggaaagcacttcgtgatactccagagagatagtctccagtacgaggttttctaccgttggatgcgttgcacgaagcagagattccgtacaaccggtgcactcctgcgcgccaatccagataactggcggacgctgcgggttagtaaccgattcggccatctctgcagcggctttgctacttaaccccatggtggcggctaatgctgcacaaagcttcatgaaatcacgacggttaatgccgtgagaatggatgagggtgttatctccagtcatttatagttattccgttgcgaagacctggcatatattttgcctcaatcgcaaaatcaataatgcgatcgatgcgccatttaccacacatttattatggttatcgatatcatgatactgcggcggggcgctaaaacgaagggaagaagcattagtgtaattaattaaagcaagataatacgtatgtttgatcaattttcgaggcgataaccggccataaaaaagcgcaacgtagaacaggaattattctcacgaaagaaatccattaccatctctttatccagtccatagcggcgcgtcagaatacccgcttcccaggcgctaagctggcgatctccggtcttttcgtacatccggtgtgagtagcctaatacaaaaccgcgtttataatcggcacagaattttgtcacattaaccgcactgtcggcatgcgttgcttttaatcccgccattaagcctttaccaaaatggttattcatcgttcacctcattcgctatatattgtcatatatagcgatattttaggcaaagaacgacttttgcgcacgctattttttcatgcttgtttaagacgtaatcccgtaagagataaacctatcaggagagatatttatcgaaccatttcagtgtcctttgccaggcaagatcggcggcagatttgtcataacggggcgtggaatcattatggaatccgtgattaacccccggatagatatacgcctcataaaccttattattggctttcaacgccgcctcgtaagcaggccagccctcgttgattcgggtgtccagttccgcgaagtggagtagtaaaggcgcttcaatcttcgccacatcggcagtgggtgcctgacgaccataaaacggcaccgcgcaggccagttccggatacgcgacagccgccgcgttcgatacgccaccgccatagcaaaatccggtaatacccactttgcctgtcgcttgcggatagcgttgcataaactcaattgcggcaaagaaatcattcatcagtttgttggatcaacctgctgttgcagctcacgacctttatcatcatttcccggataacctccaacggaacttaagccgtcaggtgccagggcgatataccccgccttcgccactcgccgtgccacatcttcgatatacggattcagtccacgattctcatgcaccaccactacggctggcgttttgccgctcatctttgcgggcttcaccagataaccccgcacctcgccgtgaccatttggcgaaggatacgtgatgtactcagcaacaatttccgggtcggtaaactctacctgagtcgccagcgcataatttggcttgagcaaatcaaacaacgctaatgccgtcatcccgcctaccgcacttcgccgcaaggttgaggaactcacgtttcgagattttcccgtgagcgtaatagtcatagtaatccagcaactcttgtgggaaatctttggcggttaaacgcggcatcgttgcactcctcagttggtgtttttttaagcaaagcataagcacgtatttttgcccagtttttcgtcactctgtgagccagactacgggatacgcgctggcgaatcgctaaactagaaacattgtttcgaaattgaacggtggaaaggagaggtcatggtctggttagcgaatcccgaacgttacgggcagatgcaataccgctattgcggaaaaagtggtttacgcctgcccgcgttatcgctcggtttatggcacaatttcggtcacgttaacgcgctggaatcacagcgtgcgatcctgcgtaaagcgtttgatttgggcattacgcactttgatttagccaacaattacgggccgcctccaggaagcgcagaagagaactttggtcgcctgctgcgggaggattttgccgcttatcgcgatgaactgattatctctaccaaggctggctacgatatgtggcccggcccttacggctctggcggttcacgtaaatacctgctcgccagcctcgaccaaagcctgaagcgtatggggcttgagtatgtcgatatcttttactctcatcgcgtcgatgaaaatacgccgatggaagaaaccgcctctgcgctggctcatgcggtacaaagcggtaaggcgctgtatgtcgggatctcctcttactcgccagagcggacgcaaaaaatggtcgagttgctgcgcgagtggaaaattccgctgttaattcatcaaccttcgtacaatttactgaaccgctgggtggataaaagcggcctgctggataccctgcaaaataacggcgtgggctgtattgcctttactcctctggctcagggattgctgaccggaaaatatctcaacggcattccgcaagattcacggatgcatcgtgaagggaataaagttcgtggtctgacaccgaaaatgcttaccgaagccaacctcaacagcctgcgcttattgaatgaaatggcacagcagcgtggacaatcaatggcgcaaatggcgttaagctggttgctgaaagatgatcgcgtgacgtcggtattgattggtgccagccgcgcggagcaactagaggagaacgtgcaggcgctgaataatctgacatttagcaccaaggagctggcgcagattgatcagcatatcgccgatggcgagctgaatctgtggcaggcgtcttccgataaatgacctgttaataacgggcgcgcgaaccgcgcccgaatcagatcagtgattatgacgagtcagtcggtcaagatagcccatcacaaatgcagaaagcacaaacgtcagatggataatgacgtaccacatcagtttgttatccgggacatttttcgcatccataaagacgcgcagtaagtgaatggaagaaattgccacaatcgacgctgctactttgtttttcagcgacgttgcgtccattttccccagccagttcagcttctctttgttctcggagatatccagctgtgagacgaaattctcataaccggaaaacatcaccatcaccagcaaaccgccaaccagcgtcatatccaccagcgacagcaacacgaggatcaaatctgattccgccatcgagaagatattcggcagtacgtgaataatctcctggaagaacttcagcgccagggcaactaacgccagcgaaaggccaaagtacacgggggcaagcagccagcgagaagcatacattgcattttcaagaaaacgttccatacattcctgtcgtgtagttaaaacgggcaacagtatatcgcaattgagtaaacagcacgcaacagcaaatcaacatatacgttaaacctttgtcgcataattctgaggtttagggatcttcctggttcccttatcaacgcatcgagaacgtctacccttaaaggacgttgaacctgaagggagaaaaacgatgtctcatttaaaagacccgaccacgcagtattacactggtgaatatcccaaacagaaacaaccgacgccaggcatccaggcgaagatgacaccggtaccggattgcggcgagaaaacctatgttggtagcggtcgcctgaaagatcgtaaagcactggtgacagggggcgattccggaataggtcgcgctgccgccatcgcttacgcgcgtgaaggggctgacgtggcgatcagttatcttcccgtggaagaagaagacgctcaggatgtgaaaaagatcattgaagaatgcggacgcaaagccgttctgctgccaggcgatttaagcgatgagaaatttgcccgttcgctggttcacgaagcgcacaaggcgttaggcgggctggatattatggcgctggtcgccgggaaacaggttgccattccggatattgcagacctcaccagcgaacagtttcaaaagacctttgccattaacgttttcgcgctgttctggctaacccaggaagcgatccccctgctaccgaaaggtgcaagtatcatcaccacttcgtcaatccaggcataccagccaagtccgcatttactggactatgcggctacgaaggcggcgattctgaactacagccgtggcttggcaaaacaggtcgcggagaaaggtattcgggtgaatattgtcgcgccaggcccgatctggacagcactgcaaatttccggcggacaaacgcaggataagatcccgcagtttggtcagcaaacgccgatgaaacgtgcggggcaaccggcggaactggcccctgtatatgtttatctggcaagtcaggagtcgagctacgtcaccgcagaagtgcacggcgtgtgcggcggcgagcatttaggttaaaaaaatgcccggttgtgaaaagcaaccgggcatcattgtgaattcactcttacctgatgtggcgaaaacgccttatccgcctacaaacgcatgaagattcaacatgttgcaatagattttgtaggcctgataagcgtagcgcatcaggcattgagcacctaatgccggatgcgtcgtgaacgccttatccggcctacaaacgcacgaagattcaacatgttgcaatagattttgtaggcctgatgagcgtagcgcatcaggcaattctactttacttcgctttggcggtttcttcgccgaccagacctatcttcaggtaacccgcctgatgcagcgtatccattaccttcatcaacgtctcgtaatcgacggttttgtccgctcggaagaagatggtggtgtctttcttgccttcggttaacgcattcaacgccgtaatcattgtttcatcggtgaccggatcgttaccgataaacatcgagttgtctgccttcaccgacagataaaccggtttttccgggcgcggctgcggcgtgctggtagaagcaggcaagttcaccttcacatctaccgtcgctaacggtgccgccaccataaagataatcagcagaaccaacatcacgtcgataaacggcgtcacgttgatatcatgcatttcgccgttatcgtcgaggttttcgttaagatgcattgccatcggatattatcctgcgcgtaatttttgtgcgacacgaaccggatgcgcagcggcgctggcttccagatccaggtcacggctttgcagcaacaatacctgcgctgcaacatcacccagcatcgctttaaagccgccaatctggcgtgcaaatacgttatagataacgaccgcaggaatcgctgccacgaggccgattgccgttgctaacagagcttctgcgatacccggcgcaacgactgccaggttagtggtctgcgtttgcgcgataccaataaagctgttcatgatgccccagaccgtaccaaacagaccaacgaacggagaaatcgcgccgatggttgccagatagccgttaccgcggcccatttgacgacccactgcggcgacccgacgctccagacggaagctggtacgttctttaataccttcgttatcgtcgctgccttctgacagttccagctcattctgcgcttcattgagcaaatgcaggcttaagcttttgctaccaaaatcagcggcgatatcgttggcctggtttaaggaacgcgcttcagccagcagttgctgctcgcgcttaaggcgacgcttctgattgaagaactctacgctcttactgaagaagattgcccaggtgactacggaggccaaaataagcccaatcatcacgcacttaacgacaatatcggcgtgctgatacataccccagacggaaaggtccgtctgcattaaattattacccactgtgtatctccaggacgcaagtcacaaaatctgcgcataataatatcaaaacgacgtcgaattgatagtcgttctcattactatttgcatactgccgtacctttgctttcttttccttgcgtttacgcagtaaaaaagtcaccagcacgccatttgcgaaaattttctgctttatgccaattcttcaggatgcgcccgcgaatattcatgctagtttagacatccagacgtataaaaacaggaatcccgacatggcggacaaaaagcttgatactcaactggtgaatgcaggacgcagcaaaaaatacactctcggcgcggtaaatagcgtgattcagcgcgcttcttcgctggtctttgacagtgtagaagccaaaaaacacgcgacacgtaatcgcgccaatggagagttgttctatggacggcgcggaacgttaacccatttctccttacaacaagcgatgtgtgaactggaaggtggcgcaggctgcgtgctatttccctgcggggcggcagcggttgctaattccattcttgcttttatcgaacagggcgatcatgtgttgatgaccaacaccgcctatgaaccgagtcaggatttctgtagcaaaatcctcagcaaactgggcgtaacgacatcatggtttgatccgctgattggtgccgatatcgttaagcatctgcagccaaacactaaaatcgtgtttctggaatcgccaggctccatcaccatggaagtccacgacgttccggcgattgttgccgccgtacgcagtgtggtgccggatgccatcattatgatcgacaacacctgggcagccggtgtgctgtttaaggcgctggattttggcatcgatgtttctattcaagccgccaccaaatatctggttgggcattcagatgcgatgattggcactgccgtgtgcaatgcccgttgctgggagcagctacgggaaaatgcctatctgatgggccagatggtcgatgccgataccgcctatataaccagccgtggcctgcgcacattaggtgtgcgtttgcgtcaacatcatgaaagcagtctgaaagtggctgaatggctggcagaacatccgcaagttgcgcgagttaaccaccctgctctgcctggcagtaaaggtcacgaattctggaaacgagactttacaggcagcagcgggctattttcctttgtgcttaagaaaaaactcaataatgaagagctggcgaactatctggataacttcagtttattcagcatggcctactcgtggggcgggtatgaatcgttgatcctggcaaatcaaccagaacatatcgccgccattcgcccacaaggcgagatcgattttagcgggaccttgattcgcctgcatattggtctggaagatgtcgacgatctgattgccgatctggacgccggttttgcgcgaattgtataacattgccacttttggacaattttgcagacattttattgtgaaaagtcttaaattgttgcgtccgggatcaaggcgtcccggacgattcaggagtacaataggcagataaaggcttaaacgctgttccacaggaaagtccatggctgttattcaagatatcatcgctgcgctctggcaacacgactttgccgcgctggcggatcctcatattgttagcgttgtttactttgtcatgtttgccacgctgtttttagaaaacggcctgctgcccgcctcatttttgccaggcgacagcttgttgatactggcaggcgcattgattgcccagggggttatggattttctgcctacgattgcgattctgaccgccgcagcaagtctgggctgctggctaagttatattcaggggcgctggttagggaataccaaaacggtgaaaggctggctggcacagcttcctgctaaatatcaccagcgcgccacctgcatgtttgaccgccacggtctgctggcgctgctggctggacgttttcttgcatttgtccgtacgctgctgccaaccatggcgggaatttccggtctgccaaaccgccgcttccagtttttcaactggttaagtggattgctgtgggtcagcgtggtaaccagttttggctatgccttaagtatgattccgttcgttaaacgccatgaagatcaggtaatgacgttcctgatgatcctgccaattgccttgttaaccgctggcttgttaggcacgctgtttgtggtgattaaaaaaaaatactgtaacgcctgacgattttccccgttcccggttgctgtaccgggaacgtatttaattcccctgcatcgcccgcattcttgccgcatcttcccccggcgtcacaccgaagtaacgtttaaactcacggctaaattgcgatgcgctttcatagccgacgcgcatcgctgctgcgctggccttcatgccgtcatggatgatcatcatccgcgccttatgcagacggtaattcttcaaatactgcaacggcgaggtactggtgacagacttaaaattatggtggaacgccgatacgctcatgttggcttctgccgccagttgctcgacgctcaggttttcggtgtatttattctcaatccgtttcagcacgcggctaatcagactgaagtgagtctggcgactgaccagcgccagtaacgcgccgccgcaaggtccggtcagcacgtagtacagaatttcgcggatgatctgtttgccgagaatacgcgcatccagtggtcgctccatcacgtcgagtaaccgctccgccgcgcataaaatctcttctgataacgtggcggagttaatcccgctggctgccatcgacggctggaaatgctcatcttcgccaatgtccatcaacagttcctgtaactgcaaaatatcgacattgagacgcaaccctgccagcggcacctctgacgtggcataggtttcgcactcaaacggcaacggcaccgtcagcagcaggtattcattggcatcataacgaaacacgcgttcattgatataaccgattttatgcccggaaaagagaattatgatgccaggctcgtacatcaccggtgtacgtgcgaaaggcgtctcgccatacaacaaacgcacatcgggcaacagtcctgacaaactattttctttatttttcagtttattaactttatccgccagcaagcggcaaatctcttcacgtttcatatcgcgtaatttcttaggaataatgcggcaatttgattgtgcgcaattttgtagcatttctccagcactctggagaaataggcaagacattggcagaaatgagcattgagagccagggcgctggcgatcacaatgaaaaacatcaggcagatcgttctctgccctcatattggcccagcaaagggagcaagtaatgaacaactttaatctgcacaccccaacccgcattctgtttggtaaaggcgcaatcgctggtttacgcgaacaaattcctcacgatgctcgcgtattgattacctacggcggcggcagcgtgaaaaaaaccggcgttctcgatcaagttctggatgccctgaaaggcatggacgtgctggaatttggcggtattgagccaaacccggcttatgaaacgctgatgaacgccgtgaaactggttcgcgaacagaaagtgactttcctgctggcggttggcggcggttctgtactggacggcaccaaatttatcgccgcagcggctaactatccggaaaatatcgatccgtggcacattctgcaaacgggcggtaaagagattaaaagcgccatcccgatgggctgtgtgctgacgctgccagcaaccggttcagaatccaacgcaggcgcggtgatctcccgtaaaaccacaggcgacaagcaggcgttccattctgcccatgttcagccggtatttgccgtgctcgatccggtttatacctacaccctgccgccgcgtcaggtggctaacggcgtagtggacgcctttgtacacaccgtggaacagtatgttaccaaaccggttgatgccaaaattcaggaccgtttcgcagaaggcattttgctgacgctaatcgaagatggtccgaaagccctgaaagagccagaaaactacgatgtgcgcgccaacgtcatgtgggcggcgactcaggcgctgaacggtttgattggcgctggcgtaccgcaggactgggcaacgcatatgctgggccacgaactgactgcgatgcacggtctggatcacgcgcaaacactggctatcgtcctgcctgcactgtggaatgaaaaacgcgataccaagcgcgctaagctgctgcaatatgctgaacgcgtctggaacatcactgaaggttccgatgatgagcgtattgacgccgcgattgccgcaacccgcaatttctttgagcaattaggcgtgccgacccacctctccgactacggtctggacggcagctccatcccggctttgctgaaaaaactggaagagcacggcatgacccaactgggcgaaaatcatgacattacgttggatgtcagccgccgtatatacgaagccgcccgctaagctttttacgcctcaaactttcgttttcgggcatttcgtccagacttaagttcacaacacctcaccggagcctgctccggtgagttcatataaaggaggaacgtatggctaatccaaccgttattaagctacaggatggcaatgtcatgccccagctgggactgggcgtctggcaagcaagtaatgaggaagtaatcaccgccattcaaaaagcgttagaagtgggttatcgctcgattgataccgccgcggcctacaagaacgaagaaggtgtcggcaaagccctgaaaaatgcctcagtcaacagagaagaactgttcatcaccactaagctgtggaacgacgaccacaagcgcccccgcgaagccctgctcgacagcctgaaaaaactccagcttgattatatcgacctctacttaatgcactggcccgttcccgctatcgaccattatgtcgaagcatggaaaggcatgatcgaattgcaaaaagagggattaatcaaaagcatcggcgtgtgcaacttccagatccatcacctgcaacgcctgattgatgaaactggcgtgacgcctgtgataaaccagatcgaacttcatccgctgatgcaacaacgccagctacacgcctggaacgcgacacacaaaatccagaccgaatcctggagcccattagcgcaaggagggaaaggcgttttcgatcagaaagtcattcgcgatctggcagataaatacggcaaaaccccggcgcagattgttatccgctggcatctggatagcggcctggtggtgatcccgaaatcggtcacaccttcacgtattgccgaaaactttgatgtctgggatttccgtctcgacaaagacgaactcggcgaaattgcaaaactcgatcagggcaagcgtctcggtcccgatcctgaccagttcggcggctaacatgcaaattctcccggtggcggtaatgttccgctaccggacttttcagaaatcatttattcccctcgcgtcccgcccgttgttactcttccttgttcaggaatgccaaatataaggacatcatcatgcagagccggaagctcttaaaagaacaactcatctatatccgggataaacgcaacggagaggtgaaaaacagatgaaaataatacttctgtttttagcagccctggcaagttttaccgtacacgcacagcccccctcacagaccgtagaacaaacagtccggcatatttatcagaactataaatcagatgccactgccccttattttggtgaaaccggagagcgggcgataacttctgcgcgtattcaacaggcgcttaccctgaacgacaatcttacgctgccgggcaatattggctggctggattatgatccggtttgtgattgtcaggattttggcgatctggtgctagaaagcgttgcgataacccaaactgacgccgatcatgccgatgccgttgtgcgctttcgtatctttaaagatgataaagaaaagaccacgcagacactgaaaatggtggcggaaaatggtcgttgggtcattgacgatattgtcagcaatcatggcagcgtcttacaagcagttaatagcgagaatgaaaaaacgctggccgctttagcttcgttgcaaaaagaacagccggaagcctttgttgccgaactctttgaacatattgctgattatagctggccgtggacgtgggtggtttccgactcttaccgccaggcggttaatgccttctataaaaccaccttcaagacggccaataatcccgatgaagatatgcaaatagaacggcaatttatttacgacaatccgatctgttttggcgaagagtcgctattttcacgcgttgatgaaattcgagtcctggagaaaaccgccgattccgcccgcattcatgttcgttttacgctgaccaatggcaacaacgaagagcaagaactggttttacagcggcgcgaaggcaagtgggaaatcgctgattttatccgcccgaacagcggcagcctacttaagcagattgaggcaaaaactgccgccagattaaagcaatgagctgaattaaataacaattagccggaacaataaataaaagggaacactatatgaaaacgattttcaccgtgggagctgttgttctggcaacctgcttgctcagtggctgcgtcaatgagcaaaaggtcaatcagctggcgagcaatgtgcaaacattaaatgccaaaatcgcccggcttgagcaggatatgaaagcactacgcccacaaatctatgctgccaaatccgaagctaacagagccaatacgcgtcttgatgctcaggactattttgattgcctgcgctgcttgcgtatgtacgcagaatgataaaaaaatccccggtagcgtgtcagttgccggggatattttttaacgtccaaccgccgctttaggccgtttcttcgcaccagcattcaccggacgagattgcgtagacgacgctttttttgccgtagcaggcgtctgacgctgggtcgccatcggcgtatgtttcgtcaacgccggacgggtattgcggttctggcgacgagcttcacgcatctcttcaatggttggcgcaggcactaagcaatcgcgacggctgccaatcagatgctttttgcccatcgcttccagcgcctggcggattaacggccagtttgccggatcgtggtaacgcaacaacgctttatgcaaacgacgctgtttgtcgcccttcggtacgaagacgtcttcgctcttataaccaatcttcgccagcgggtttttcccggtgtaatacatggtggttgagttcgccagcggcgacggatagaagttctgcacctggtcgaggcggaagcggtgctttttcagccacagcgccagattcaccatatcttcatcacgcgtaccggggtgcgcggagatgaaataggggatcagatactgctctttacctgcctgttttgagtaagtatcgaacagctctttaaagcggtcatagctgcccatgcccggcttcatcatcttcgataacggcccttcttcggtatgttccggggcaatcttcagataaccgccgacgtgatgggtcgccagttctttgatatagcgcggatcttctacggctatgtcataacgcacaccagaggcaatcaggatctttttaatgcctttcagatcacgcgcacggcgatagaggttgatcgttggttcgtggttcgtgtccatgtgcggacaaatatccggataaacgcacgacaaacggcgacaagtttgttcagcgcgtggcgatttgcagcgcaacatatacatgttggcagttggcccaccaagatcggaaatcacgcccgtaaaacctggaacggtgtcgcggatcgcttcgatctcattaatgatcgaatcttcggaacggctctgaataatgcgcccttcgtgctcggtgatagaacagaaagagcagccgccaaagcagccacgcataatgttgaccgaaaaacggatcatttcgtaagccggaatacgggcattgccataggccggatgtggcacgcgcttgtatggcagcgcaaaaacgctgtccatctcttcggtagaaagcggaatagcaggcgggttgatccacacatagcggtcgccgtgtttttgcatcaatgcgcgggcacagcctgggttggtttcgtggtgcagaatacgcgaagcatgggcgtacagcactttatcgcccttcactttctcgaaagaaggcagcaacacgtaggttttttcccacggtttcgggcgcggtggctgcacggttacggctttggcttcctgctttttcggtgccaccggtttgttatccgcgcacggcaaatcttcaccatacggatgcgggattgggtcgatttttccaggggtatcaagacgggtggaatccacgccgctccagccaggcagcgcctctttcacgataatcgcggtattacgcacatcgcggatttcactaattggctcgcccatcgccagacgatgcgccacttccaccagcggacgctcaccgttaccaaacatcagcatgtcggctttcgaatccaccagcacggaacggcgcacggtatcggaccagtaatcataatgcgcggtacggcgcagactagcctcaataccgccgaggatcaccggtacatctttccacgcctctttacaacgctgggtataaaccagtgtggcgcgatccgggcgcttacccgcgacgttatccggcgtgtaggcatcgtcatgacgtaaacggcgatcggcggtataacggttgatcatcgaatccatgttgccagcagtaacaccgaaaaacagattcggtttacccagacgcataaagtcgtctttgctgctccagtccggctgggcgatgatcccgacgcgaaagccctgcgcttccagcatacgaccgcaaatcgccatcccgaagcttgggtgatcgacatacgcgtcgccagtaaccaaaatgatgtcgcagctatcccagccaagttgatccatctcttcacgagacatcggcaaaaacggtgccggtccaaaacaggcggcccagtactgcggccaggagaacaggtcgcgatccggttggatcagggagatagagctcattttgcttccagaaatgataaaaaaataatcaaaggccggggattataagccggaacgaaagagaaatcgaaaggtattccatactcgccctcctcgggcgagtatgaagattacggtaccggattgaccaacagttgcccaatcgagccacggtccgccatttccagcgtctgactgttgaagtagaacgggaagtgcgcccaggaaggctgaccgaaataaacaagcagctccacttgtccgtcaacccaaacggtatctttccagcctctgtcttccgggaacggcatcgcgccattcacgttacggatctggaacattacgccttcaatatggaacgcttgcggctcgtccgcgcgtaccgtccagcgttcccacgttccttgctgcgcggtgacatcaatacggttgacgtcccacagctgtccattaatacccgggtcatcacccagactgatatcgcgactgcgaattggcgaaccagccatgatttcagttggcagcaagcgcatcggaagactgtctgtgaccagcggcagaaggccggttgggcgcagcgttagcaccagggtagaaaccagaatactggatggctcaaagaagccacgaatacgatcaacaatgctcgccgcttcgccacaggtgatcgacacttcatcgccgttgctcatatccaccagaatctcgcggcgctcgcccggtgccagcgaaagttgcttcaccgatacaggagcaggcaggaatccctgatcgccagaaatcacatgtaacgggcgaccatcgttcatctgtagttgatagcgacgagagttcgacgcgttcagcagtcgcaagcgcacccagccacgcgagacttcaacgtacgggctttgtacaccgttaaccagcagcgtatcaccaacaaagccgccgcttcccggttcgttgtattctggcgtaccaaagttatccagccgtttatcctggataatgaccggaaaatcatccacaccataatggttggggataggcagcgacttgctgacttcatcttccaccagccacattccggcaaggccgttatagacctgctgagccgtgcggttgggagtattggcgtgataccacagagtagctgcgttctggcgaatgggcagtacgggtgcccagtcagcgtttggcgacatcatccgtgccggaccgcccatcagcgggcctggtacctgtagcccggccaccgtcattgagacattttctgtcaggcggttgctgtaaataagcttaacatcgtcgcccttccagacgcggatagtcggccccaggtaacgaccattgattccccagaccgacgcgcgtgtccctggcgtaaatgaccagtgcgcacgttgtacagtcataaacagcggttgcccacggcgagattcaagtagcggcggaacgggtagcggttgctgttgcccggctgcgctggccttcaggggaacagcgcctgcacaaagtgcaatccccgatgcctgaatgaactgacgccgactgagtgacatatttgctccatgtaaaactggctaaagtaataccgtgcaggaaagtgttccccgcaaaaatacagattgccgacttaaacttttccggcggcttcgcgttctgcgacttctttatcgagctcggcgattttttgttccattatcgaacgacaatgggcagccagctcacgaacctgatctttgccatactgactgacgtcaattggcggcagcatttcgacaatcaccagaccgttgtgcagtcgattaagattaatcttattcgaagttgtagagacgcacacgggaataatcgggacgcccgccgcaattgccgcgtgaaatgctccagtcttgaacggtagcaggccgcgaccacggctgcgggttccttccgggaacatccagatggaaatacggcgttttttgaagtgattcactacttccgcaatggtgccgtgagctttagtgcgattgtttctgtcgatcaataagttgccggttaaccagtacaactgcccgaagaaggggatccacagcaagctctttttacctaccgtcaccgtcggcggttgcacgatgttcgatgctgtcaccatgtcatagttgttctggtggttagcgatatagatagcattgccgtagctttcagcgtctgtaggtttacggcactcaactttcaggccaaacagcggcgcaagacggccaaacatatgcccaaaggtggccacatgtttcgggttacgcgggctgaaaaggcagtaaatggagccgaatacacagactaagatgctgtaaatcacggtaataataagacgaaagatatatagcataacaccctctgaaggtctgagagactggcattgtacgtcacctgaaatcaggttagggcattgttaaaagccgctctctggaaaagcgtattgttaatcgcaacgcatgaataaacaacggtttcaagggaatttttatcgtttccgggggttgaatacgctgccggatgacgacttaacgtttcatccggcgttccttgcaagcgggaggaaacagcgccctccccggcatattactcttcgctatcaccgctgctggcacggcgaggagagtcgatctcaacacgatcgatacgctgcaaaccgcgcatcaacgtaccgcggcgtccacgttcgccagtgactttctgtaactcttccgggcgcagtttaattttgcgtttcccaacatgaatggtcagcgtgctttgcggcggcagaacgtacaattgcgccagaccatcttctccacgcgcggcttctgccgatggaatgttgataatcttgttgcctttgcccttcgacagctgcggcagatcacttaccgggaacatcaacatacggcctgcctgagtgattgccagcagcatatcggaagcatcttcaatcaccaccggcggcataacatgggcattttccggtaaggtgatcaaagccttacctgcacggttacgcgccaccagatcgttaaaggtgcagacgaaaccgtaacccgcatcggaagccatcagcagtttctgatcgtcgctttccatcagcatatggtcaacggtcgccccaggcggcaacgttaatttgccggtgagcggctcgccctgaccacgcgccgacggcagcgtaatcgggtcaatggcatagctacgaccggtggaatcaacaaacactaccggttggttgctcttacctttcaccgccgctttgaagctatcacccgctttataattcaggcccggcgcgtcgatatcatggcctttagcgctgcgtacccagcccatctgcgacagcacaatggtgacaggttcagacggcagcatgtcgtgctcgctcatcgctttcgcttcttcgcgttcctgcaacggcgaacgacgatcgtcaccgtaggcttgcgcgtctgcctgcagttctttcttcagcaggttattcattttacgctcggaagccaaaatgccctgcaactggtcgcgctctttttccagttcactctgctcaccgcgaatcttcatctcttccagtttggcaagatgacgcagtttcagttcgaggatcgcttccgcctgggtttccgtaaggccaaaccgcgacatcagcgccggtttcggttcatcttcattacgaatgatctcaatcacttcgtcgatattgagaaacgccaccagcaaaccttcgaggatatgcaggcgcttgaggactttctccagacgatagttcagtcggcggcgcacggtatcgcggcggaacaccagccattcggagaggatttccagcaggtttttcaccgccggacgaccatccagaccgatcatattaaggttaatacgatagctcttttccagatcggtggtagcgaagaggtggttcatcacctgatccatatccacgcggttggaacgcggcacaatcaccaggcgggtcgggttctcgtggtcagattcatcgcgcagatcgtcaaccatcggcagctttttgttgcgcatttgcgcagcaatttgctccagtacgcgcgcacctgaaacctgatgcggcaatgcgctgataaccaccgcgccatcttctttcttccacaccgcgcgcatacgcactgaaccacgtccgttctcgtagattttacggatctcggcgcgcgaagtgataatttccgcttcagtcggataatccggcccctgcacgatatccagcagctgatcgagcgtggttttcggctggtcgattaatgcgattgccgcctgagccacttcacgcaggttatgcggtggaatatcggtcgccatgccgacggcaataccggtggtgccgttaagcaaaatgtttggcagacgggcaggtagcattttcggctcctgcaaagtgccgtcgaagtttggcacccagtcagccgtcccctgccccagctcgctcaatagcagctcggaatatttcgacaaccgggattcggtgtaacgcattgccgcgaacgatttcggatcgtccggcgcgccccagttcccctgaccatcaaccagcggataacggtaagagaacggttgcgccatcaggaccatcgcttcataacaggcgctatcgccgtgcggatggtatttacccagtacgtcaccgacggtacgggccgattttttaaatttggcgctggcattcaggcccagttcagacatcgcatacacaatgcggcgctgaacaggtttcagaccatcaccaataaacggcaacgcacggtccatgatcacgtacatggagtagtttaagtaggcgttttccgtaaattcatgtagcgcaaggcgctctgccatatcgctcattaattctgattcctcaacttattcgccagccttcaaaggggcaatattgccggagatactacattatctgccgcgtcgagtcacaggagatcaacgtgaatagcgccgccggacgtgctccgacggcgataaaggcatcaatgtgccttgatatacaactctttgctgtagacataatcctggggattatgcagcggaaaaccgccaacgtagggtttaagcagtttgattaacggctgatagtagataggaatcagcggtgcctgttggttgatgatcacttctgcctgctgatacaacgcattacgctttgtcgcatcagtgatctgcgtggcctggtttagtaaggcgtcatactgcgcatttttccagtgaccgacgttttcttcactatcgcttttgagcgtgttcaggaagctggaagcatcattgtacgtcgcatcccacgactgccgagacagcatgaaatcaccggctcgtcgggcatcaagataggttttccactccattgtgcgcagcgtcacctgtgcacccagccattttttccattcggaagacaacgctatcgcggtcttttcatgcagatcgtacttgttgtagaacagctcaaagcgtagcggatgagaggcgtcgtatcccgcctgtttcagcaaggcttttgccatcgcgacgcgctcactcattggcttttgcagttcatcgaacgtcgtcgcgctaaagccttttacctctggcggcgtcagcgtggttgcgggcgttctcaaccccagtaccttttgcgcaataagctgtcgatcaaccgtaagatatagcgcccgacgcactcgcacatcgttaaatggcggtttctcaaggttgaagttgtaatattcgctgttcagacgcggaataattcgtagctcgccaggcagtgatttttcaatggcgggaatttgctgcgccggaacccaggtgagatcgacctctcccgcgcgatagcggttatagccggtgaccgaattatctagcgccagatactcaacctgttgcaatactgtatgttgcgcatcgcggtactttggatttttgcgtgcagtaatcttttcgttaactacccactgatcaagcacaaaggcaccgttgtaaaccatgttctctggcttactccagctatcgccatgtttagcgatgacatgatgaggaaccgggaacagcgtcggccaggcgagcatcgtcgtgaaccaaggaaccggctgctcaagcgtaacttcaagagtacgatcatccgtcgctttgacacccagcgatgtaacatctgctttacccgcaacaatagctgcggcattgttaatgtgcgcctgtgccagatagccagcaaaagggcttgccgttttcgggtcaaccgcgcgctgccagccgaggacaaaatcctctgccgtcagaggctgaccgtcggaccactgcaaaccgctacgcagatggaaaatatagcgcttgccgccgtccagtatctcccagcgttcagcctgagcgggctgcacctggccttcaccgtccatccataccagaccttcaaacagatccagcacaatctgcgcggcagtattctcctccaccttttgcgggtcgagcgtacctgggtcgctatgattgttgtaacgaaagacttgttgcggggcgagcggtgtgttggcgggaacgtcagcagcgtagagaggagccgcacttaccaggctgaccagccataataaatttcgcgtatacatggtattccttaccggagaaattataagcccaacaacaatacgcctgtggcattgttcgctcaaacttatcgcgagtgatttggctcacactccggtaaagaaaaaagcgagttgcccccgcttttccattaattaacggatttcattcaatagttctggatgcttatccagaacacgtaaaagtttgattgtggaaggatgaggttgggcattgcctttttcgtaacgcgaaaacgcatttacacctcccccaaaaatttcgcttgcctctttttgggtaagagagagcttttttcgaaccttcactataaattcaggtgccactgtttcggcattcaccgaagcccgaaatgcctttacttgcgccatgaaagcatctgactcttctttattcatgatgctctcttcgcaatggacacaatataaaccgtggatacctttcaatactgtttttcgtccacggaaggtgtatggaatatctttaatgccagaaaccatttctccctggtggcaaaccggacatttcatattacttctccttaaacgagacgatcagtacgtcatgaattaccgtaattttaagataaacctggcctgtaacaagcctgggtctgtaaacatcctgccagatagtatgatcagagtaggtggtcatgcttttataaaagtcgctctctgataatccaatgataacattacacataccatcaaaatccaaacctaactcatctgcatttaacagggcactacgtgttgtacgaacttgcccggcattgacaagttttttaacctgactcaaacgtgtatgtggtgtgcgtttttccataacccccgcctccctgttactttagttataacctaaaaggttaattacagcaatgaaaaagcacctaaaaggttagttagatgtacggagatagtgaccacacaaaacgtattctttaaggaaagtgattgaccatataagaaagtggcgcattagtagcgccagtttgaagcaggaatttataagggaagctggagtcaggcatcacgccaacggcacataaacatccgtttccagtcgctgctctgtcaccccttcggcaagattggtgtagtgaaacagaatcggtgctttacgcattttctcgccgcttgcaggcagccagtggcgaatgatgccccataccgtgtgtgaaatatcgtccagctcgccaacgtggcgggccacggcataacgtccaccggtaagttcaccattgctcacaccataacgattatcgggaatcggttcgctaacgctgccgcagatatcaaagcgaaacgcttccggtgcggtggtggcagggtcgtcccaggcgacgccaaaagtctggctttggttaacaggagaaagccccgtctctttacgccacatgataaatttcgccacgctgtagttgagcaattcagggctacagcggtgcggcaacatcgccacaggtattgatgggaaatcgataatgtttacatccagtgtcaggtttgtcattttgcctccctgcgaaattattcccgggaacgcgtcccgggagcggtaacaattacggatttactttgcggatctgtttgacgtcaatttcaacagaattccagtctttatcgacttcaccctgaatctcaaccgtatctttcggcgtcaccgtcacgccgttccagcgtttgtggtcgatatcaacattgatagtaccgctggcatctttgaacacgtagagatcgtcagagatgcgttcaacgatattgccgcgcagggttacccaggtgtcgtcacgcagggattttgcgctttctacagtcgttacgctgccgttcggcccctggaatcctccggcctgactttgcgttgccgatgggccagaaaaaccgccctgctctgctgccatcaccggtgcgctgcacagggccattactgcgattactgctgcgaattttttcatgtttattactccctttaatgtctgtttccgagcatttaacaagatagtccttaacaacttcttaagggaaaaaaataaaatttagtgctgtacagagcgcgttacaacacggtttactggcagcaaatacggttatcgcagggatgaaaaaatgcgaattttactgatagaagatgacatgctgattggcgacggcatcaaaacgggccttagtaaaatgggttttagcgtcgactggtttacacaaggtcgtcagggaaaagaggcgctttatagcgcaccttatgatgcggtgatcctggatttaaccttaccaggcatggatggtcgcgatattttgcgcgaatggcgagaaaaaggtcagcgtgagccggtactgatcctgaccgcgcgcgatgcgctggcggaacgtgtagaagggctgcgtctgggagctgacgattatctgtgtaaaccttttgcgttgatagaagtcgccgccaggctggaagctctgatgcgccgaaccaacggccaggccagcaacgagctgcgccacggtaacgtcatgctcgaccccggcaaacgtatcgccacgctggctggcgaacccttaacactgaaaccaaaagaatttgccctgctggaattactgatgcgtaacgctggtcgggtactgtcgcgcaaactgattgaagagaaactgtatacctgggacgaagaggtcaccagtaatgccgttgaagtgcatgtgcatcatctgcgacgcaaactcggtagtgattttattcgtaccgtgcatggtattggttacacattaggtgagaaatgaaatttacccaacgtcttagtctgcgcgtcaggctgacgctaatctttttaattctggcctcggtgacctggctgctttccagctttgtcgcctggaaacaaacaacggataacgtcgatgaattgttcgacacccaactgatgctgtttgccaagcggttaagtacgctcgatctcaacgaaatcaacgcggcggatcgcatggcacagacgccaaatagattaaaacacggtcatgttgatgacgatgcgctgacctttgccatctttacccacgacggcagaatggtccttaatgatggcgataacggagaagatattccctatagctatcaacgggaaggttttgctgacgggcaactggtcggtgaagacgatccttggcgttttgtctggatgacctcacctgatggcaaatatcgcatcgttgttggccaggaatgggaataccgtgaagacatggcgctggcgattgttgccgggcaattgatcccgtggctggtcgcactgccgattatgttaatcatcatgatggtactactgggtcgtgaactcgcgccgctgaacaaactggcgctggcactacgtatgcgtgaccctgactcggaaaaaccactaaacgcgactggcgtacccagcgaagtgcggccactggttgagtcgctaaatcaactgttcgcccgcacacatgcgatgatggttcgtgaacgacgctttacctccgacgcagctcacgaacttcgtagcccgttaacggcgctgaaagtgcaaaccgaagttgcgcagctctctgacgatgatccgcaggcgcggaaaaaagcactgctccaattacattccgggatcgatcgcgctactcgtctggttgatcaactgctcacgctatcgcggctggactcactggataaccttcaggacgtcgcggagatcccgcttgaagatctcctgcaatcgtcggtgatggatatttaccacacggcgcagcaggcgaaaattgacgtgcgactgacactcaatgcccacagcatcaaacgcaccgggcaaccgctattgctaagtttgttggtgcgaaatttgctggataacgccgtgcgctacagtccacagggcagcgtggtagacgtcacgctgaatgctgataatttcatcgtgagggataacggccccggtgtgacaccagaggcactggcgcgaattggcgaacgcttctatcgcccacccggacaaaccgctaccggcagcgggcttgggctatcgattgtccagcgaatcgccaaattgcatggcatgaatgttgaatttgggaatgcggaacaaggtggatttgaggcgaaggtaagctggtaacttctctgtctatgagagccgttaaaacgactctcatagattttactaatagcaaaatataaaccgtccccaaaaaagccaccaaccacaaaccagacaaataccgagcgagaatacatatacccaaaactcgaacatttcccgcataaagagttttcttaagataagaataataagtggcgtaagaagaaaaaatgctgcaatcattgcttgcaatatacgatcttcgcctgaaacggaaggtatactgcaaatatttcctcccgactcaagcatccagtcatacttattgaaagcaaaaaaagaatctattaaccaataagtaagcattatatatagcaatgcttcaaatattgttttaattttctgctttaacatatatcagtacgctcataaaaatccatttataattatcaacatgacacgttgatactttcatcttttacttattcaaagccatattttcaatccccaaaaaaaccgaaccaaacgtgtaaattattccggtgcgagtaagaattatgaggaatggctatcagtattgtcattttcagaaaatatttatcctgcatcggtgagtcagagtaagatcagacttttgctaaattcgcaaaagactttgcacattttgctaatttcaccgtaccgctctgtgacgtactatagtcggcaaacgtctcaccttgaggttaaaaaatgagcaacatcctgattatcaacggcgcgaaaaaattcgcccactccaatggtcaactgaacgacaccctgaccgaagtcgcggatggcacactgcgcgaccttgggcatgatgtccgcatcgttcgcgccgacagcgactacgatgtcaaagcggaagtacaaaactttctctgggctgatgtggtgatctggcagatgccaggctggtggatgggcgcgccgtggacagtgaaaaaatacattgatgatgtattcaccgaaggtcacgggacgctgtatgccagcgatggtcgtacccgcaaagatccgtcgaaaaaatacggttccggcggcctggtacagggcaaaaaatatatgctttctctgacctggaacgcaccaatggaagccttcaccgaaaaagatcagttcttccacggcgttggcgttgacggtgtgtatctgccgttccataaagcaaaccaattcctcggtatggaaccgctgccgacatttatcgctaatgacgtgataaaaatgcctgatgttccccgctatactgaagaatatcgcaagcatcttgtggaaatttttggttaactagagctcaggctttagaaggagttaaccatgcttaccgtaatcgcagaaatccgtactcgtcctggtcaacatcaccgtcaggcggtattggatcagtttgctaaaatcgttccaaccgtactgaaagaagaaggttgccacggctatgcgccaatggtggattgcgcagctggcgtgagtttccagtctatggcaccggattctatcgtgatgattgagcagtgggaaagcatcgcgcatcttgaagcgcatctgcaaaccccgcacatgaaggcgtatagcgaagccgtaaaaggtgacgtgctggagatgaatatccgtattctgcagccagggatttaatcctgccttgtttgcccggccatcctgaccgggcaatgttctttcctttaaacctcaatctccgccatgtcgcctttctcttgcaaccagttgcggcgatcttccgagcgtttcttcgccagcagcatatccatcatcgcgtcagtacgctgatcgtcttcatcatcgatagtcaactgcaccagacggcgagtgttcggatcaagcgtggtttcgcgcaattgcatcgggttcatttcccccagacctttaaaacgctggacgttcggcttgcctttcttgcgttttaattgctcaagtacgccctctttctcttcttccgtcagcgcgtaataaacctctttcccgagatcaatacggtagagcggtggcagtgcgacgtaaacgtgaccgtgtttcaccaacgcgcggaaatgttttacgaacaaagcgcagagcagcgtggcaatgtgcagaccatcagagtccgcatccgcgaggatacagattttgccataacgaagctggctcagatcgtcgctgtcaggatcgataccgatcgctaccgaaatatcgtgcacttcctgcgaagccagcacttcgtcggaagagacttcccaggtgttaaggatcttacctttcagtggcatgatcgcctgatattcgcgatcgcgcgcctgcttggcagatccgcctgcggagtcaccttccacaaggaacagctcggtacggttaaggtcctgcgcggtacaatcagccagtttgccaggcaacgccgggccgctggtcagctttttacgcaccacttttttggccgcacgcatacggcgctgggcgctggaaatcgccatctccgccagcagttcagccgcctgaacgttctggttcagccacaggataaaggcatctttcaccacgccagaaacgaatgccgcgcattgacgcgaagagagacgctctttcgtctgcccggcaaactgcggatcctgcatttttactgacagcacataggcgcagcgatcccagatatcttccgccgacagctttacaccgcgcggcagaatattgcggtattcacagaactcacgcatcgcgtccaacaggccctgacgcagaccattaacatgggtaccgccctgcatcgttgggataaggttgacgtagctttcggtcagcagttcaccgccttccggcagccacagtagcgcccagtccacagcttcagtatcaccagcgaaattaccgataaacggtttttccggcagcgtcggcagaccatttaccgcttccgccaggtaatcattcagaccgtcctgatagcaccagcgttgttcggtattgttgatctcatctttaaaagtgatctcaacgccagggcacaataccgctttggctttcagcacatgcgtcaggcgtgaaacagaaaatcgcgggctgtcaaagaaggtttcatccggccagaagtgcacactggtaccagtattgcgtttaccgcaagtgccgacaacctgtaaatcctgcaccttttcgccattttcaaaggcgatgttataaacctgaccatcgcggcgcacgttaacttctacgcgcttcgacagggcgttaaccaccgaaatccccacgccatgcaggccgccagagaactggtaatttttgttagagaatttaccgcctgcatgcagacggcaaagaatcagttcaaccgccggtacaccctcttccgggtgaatatccaccggcatcccgcgcccatcgtcaataacttctaacgactggtcagcatgtaaaataacgtccacgcgttttgcgtgacccgccagtgcttcatccacactgttatcaatgacttcttgccccaaatggttagggcgagtggtatcggtatacatccccggacggcggcgaaccggctcaagcccggtgagtacctcaatggcatcagcgttataagtttgcgtcatggtttaagttagtaattcgagttgatcgtcagagatggtgcagaccaagaaaatcgacgatcgggttgaaataatcttcgaagcccgtgaatgcgtggttgccgccttctatgacagtctggcggcaggaagcgtagtacgccaccgcctggcggtaatccagcacttcatctcccgtctgttgcagcagccagatcaaatccggcgcttccagcgggtcaatctgcatgactttaagatcgtaaatatggcgtgactctagcacatattgctgcccggtgtaggggttctcgttctgaccgagatagtccgtcagcagttcaaacgggcgcaccgccgggtttaccaccactgcgggcagcataaaacattgtgacaaccaggtggcgtaatatccccccagtgacgaaccgacaatacccagcgaatcaccgccatgttccaggacaatggattccagcagctctgccgcgtcggaaggatacggcggcaactgcggaatgatcatctcaacgtcagggtgatgttccgccagccagttttttaacaagctcgcttttgcagagcgcggcgagctgttgaaaccgtgtaaataaagaagcgtagacatcagtagccttctgaagcggtatcaggttggaaacgtgtgtccgccaggcgatgcacctcggtggtcagcgtgccatcagcatgtaactcgagagtacgccagccgggcgcgatggtatccagcgtaaagttggaacagtgcggcttaaactgcacacaggtcgacggcgttgccagcaggcggcgaccattccagtcgagatccagctcctgatgaatatgaccgcacagcaagtatttgacgtgcggaaacttcgccagcacggtatccagttcgcccgcgttacgcagactgtgttgatcgagccaactacaacccgcaggtagcggatgatgatgcagcagcagcaacgtatggcgttctggcgcatcggccagtttacgttccagccactcaagctgaaactcgctcagctcaccgtgcggcacgccaaacacctggctatccagcaacaggatttgccattgctcaccaataaacacgcgcttcgccggggagatacccgcatcctgtaacgcgctgtacatcgcgggctggaaatcgtggttgcccggcagccagacgcagggcgcacgaaaacttgcgatgccttcagcgaaatgctgataggccgcagaggattgatcctgcgctaaatcacctgtcgcgacaatcaggtcgaattcgtgctggtgtggccgaatcgcctccagcaccgcctggtaactctcccaggtgtttacccctaacagggcttcgtgcttttgtgcaaacaggtgagtgtcggtaatttgtaaaatcctgactctggcctcaccagccagaggaagggttaacaggctttccaaatggtgtccttaggtttcacgacgctaataaaccggaatcgccatcgctccatgtgctaaacagtatcgcaaccagtccgctaaaaactgattaatttgatgcttttcgtcgcgttgatgcaactttttattaggataatcataccgcgctttgaagcgaaaaatctgctggcttgaacacacttcagccaccatcgcgtcatgatacagacgcaccgtcattgacggaaggctccagtaactgatcgcgggcgcagtctgttctattgtcaccagggtagtgtatcgggtcgattccacaatcgtcagccgatattgtgcgtttgccacctgatagcttacagtttcgccgggtgcgtcattgcgcggtaacaaacggcgcaattgtgaaaagttcatctcgcacaggcgcatcatttcaggaaagtcaggtgtgtaacgcttcatttatgcccactcattttttaacgcttgatgatgcagctgcagccattgcaaagcgatgaccgacgctgcgttgtcgattttcccctcttctacccactggtatgcctgttcccggcttaccacatgaacgcgaatatcttcgttttcatcagccagaccgtgaataccgcttgcggtcgtggcgtccacttcgcccaccataattgacgaacgctcactggtgccccccgggcttgccaggaaacttaacaccggtttggtccgtttgactatcagtcccgcctcttcaatcgcttcgcgacgggcaacatcttccacactttcaccctcttcaatcatcccggcaaccatctccagtagccaaggggtttcgctggtgtcgtacgcggcaatccgaatctgctcaatcagcacaacttcatcacgcactgggtcaaagggtagcaagactgcggcgtgaccgcgctcaaaaatttcccgccgcacctcatgactcatttgcccgttgaatagacgatgacgaaatctataaagatctaatgaaaaaaagccgcgataaagtgtttctcgtgcaataatttctacatcgtttttgccaaatgtaacgggcaggttgtctggcttaagcattgttaatgtcctggcactaatagtgaattaaatgtgaatttcagcgacgtttgactgccgtttgagcagtcatgtgttaaattgaggcacattaacgccctatggcacgtaacgccaaccttttgcggtagcggcttctgctagaatccgcaataattttacagtttgatcgcgctaaatactgcttcaccacaaggaatgcaaatgaagaaattgctccccattcttatcggcctgagcctttctgggttcagttcgttgagccaggccgagaacctgatgcaagtttatcagcaagcacgccttagtaacccggaattgcgtaagtctgccgccgatcgtgatgctgcctttgaaaaaattaatgaagcgcgcagtccattactgccacagctaggtttaggtgcagattacacctatagcaacggctaccgcgacgcgaacggcatcaactctaacgcgaccagtgcgtccttgcagttaactcaatccatttttgatatgtcgaaatggcgtgcgttaacgctgcaggaaaaagcagcagggattcaggacgtcacgtatcagaccgatcagcaaaccttgatcctcaacaccgcgaccgcttatttcaacgtgttgaatgctattgacgttctttcctatacacaggcacaaaaagaagcgatctaccgtcaattagatcaaaccacccaacgttttaacgtgggcctggtagcgatcaccgacgtgcagaacgcccgcgcacagtacgataccgtgctggcgaacgaagtgaccgcacgtaataaccttgataacgcggtagagcagctgcgccagatcaccggtaactactatccggaactggctgcgctgaatgtcgaaaactttaaaaccgacaaaccacagccggttaacgcgctgctgaaagaagccgaaaaacgcaacctgtcgctgttacaggcacgcttgagccaggacctggcgcgcgagcaaattcgccaggcgcaggatggtcacttaccgactctggatttaacggcttctaccgggatttctgacacctcttatagcggttcgaaaacccgtggtgccgctggtacccagtatgacgatagcaatatgggccagaacaaagttggcctgagcttctcgctgccgatttatcagggcggaatggttaactcgcaggtgaaacaggcacagtacaactttgtcggtgccagcgagcaactggaaagtgcccatcgtagcgtcgtgcagaccgtgcgttcctccttcaacaacattaatgcatctatcagtagcattaacgcctacaaacaagccgtagtttccgctcaaagctcattagacgcgatggaagcgggctactcggtcggtacgcgtaccattgttgatgtgttggatgcgaccaccacgttgtacaacgccaagcaagagctggcgaatgcgcgttataactacctgattaatcagctgaatattaagtcagctctgggtacgttgaacgagcaggatctgctggcactgaacaatgcgctgagcaaaccggtttccactaatccggaaaacgttgcaccgcaaacgccggaacagaatgctattgctgatggttatgcgcctgatagcccggcaccagtcgttcagcaaacatccgcacgcactaccaccagtaacggtcataaccctttccgtaactgatgacgacgacggggcttcggccccgtctgaacgtaaggcaacgtaaagatacgggttatctgccgcattcttcccccttctcgcttcaatttcgaccagccatcctctattctgatgggtatttaccactggtcccggaagacaaaaatgaaacggacaaaatccatacgccacgcatcgttccgcaaaaactggagcgcacgccatctgacaccagtcgctctcgcggttgccactgtttttatgctggctggctgtgaaaagagtgatgaaacagtgtctctctatcaaaatgctgacgactgttcagctgcaaacccaggcaaaagcgccgaatgtaccaccgcgtacaacaatgcgctgaaagaagccgaacgtactgcgccgaaatacgccacccgtgaagactgtgttgctgaatttggtgaaggtcagtgccagcaggcaccagcccaggctggcatggcaccagaaaaccaggcgcaggcccagcaatccagcgggagtttctggatgccgctgatggccggttacatgatggggcgtctgatgggcggcggcgcgggatttgcacagcagccgctgttctcctcgaaaaacccagccagtccggcttacggtaaatataccgacgcgacgggtaaaaactatggcgcagcccagccaggccgcaccatgaccgtaccgaagacggcaatggcaccaaaaccggcgaccaccactaccgttacccgtggcggttttggtgaatctgttgccaaacaaagcactatgcagcgtagtgcaaccggtacctcttctcgttcaatgggtggctgataccgatggaaagagtcagtattaccgagcgcccggactggcgtgagaaagcccacgaatacggtttcaattttcacaccatgtacggcgagccgtactggtgtgaagatgcttactacaagttgaccctcgcccaggttgaaaagctggaagaagtcaccgccgaactgcaccagatgtgcctgaaagtggtggaaaaagtgatcgccagcgatgagctgatgaccaaattccgcattccaaaacacacctggagttttgtgcgccagtcatggctgacgcaccagccatcgctttattcgcgtcttgatctggcgtgggatggcactggtgaacctaaacttctggaaaataacgccgatacgccaacgtcactatacgaggcggcgttctttcagtggatctggctggaagatcagcttaacgccggtaacttgccggagggcagcgaccagtttaacagtctgcaagaaaaactgatcgatcgcttcgttgagctgcgtgaacagtatggcttccagttgctgcatctcacctgctgtcgcgacacggtggaagatcgcggaaccattcagtatttgcaggactgcgcaacggaagctgaaattgctactgagttcctctacatcgatgatatcgggttaggtgaaaaaggtcagttcacggatttacaggatcaggtaatttccaacctgttcaaactgtatccgtgggaatttatgttgcgtgagatgttctcaaccaagctggaggatgcaggcgtacgctggctggaaccggcgtggaagagcattatctccaacaaggcacttctaccgctactgtgggagatgttcccgaatcacccgaacctgctgcccgcttattttgcggaagatgatcatccgcaaatggaaaaatatgtggttaaaccgatcttctcccgtgaaggcgcaaacgtgtcgatcattgagaacggcaaaaccattgaagcagcggaaggtccgtatggcgaagaagggatgattgttcagcaattccacccgttaccgaaattcggcgacagctatatgctgattggtagctggctggtgaacgatcaacccgccggaattggcattcgtgaagaccgtgcattgatcacccaggatatgtctcggttttatccacatatttttgttgaataagccacgataccggatggcactcgccatccggtaattgttagcctatctgcaccgacagcatactcaggctgcccatttctataccctcaaccggaatggtaattggctcctgcccatcccacgcacctaacacatacaacaacggcaaataatgctctggcgttgggttcgataacgtgccaccttcatggtcgaggtaattcaccagaggatgttgttccactggcccttgccacgtcagattcgctttcacatactcattaaacgacgtcgcccacggatacggtgaactatcaccgtgccacttcactgtgcgcaggttatgcaccacgttaccgctggcgaccaacattattccttcatctcgcagcgctgccagtttgcgccccatttcgaaatgccaggcggcaggtttgctactgtcgatactcaactgcaccatcgggatatcagcgtcaggatacatcttaatcagcacgccccacgagccgtggtcaaagccccaggcttctttatccagcgtcaccgggatcggcgctaacagctcaaccagacgctgtgccagcgcaggcgaacccggagcaggataatgcgtatcgtacagcgcctgcgggaagccaccaaagtcatgaatcgtgggcggcgtctccatcgcggtcactcctgttccacgggtaaaccagtgagccgaaaccaccacaatcgcttgcgggcgtggcaatgtcatccccaacttctgccagctgcgggtatacaaattatcttccagcacgttcatcggactaccgtgacctaaaaacaatgctggcatacgtgttgaagacatgatgatatccttaactaaaggtgtcattttgatatcctcacaatacgcttgttcggcggagtaagaacccggataacaatgatgatgatcatcagttattttgacgatctgcctgaaggtgaagatttataaggagttgtcgatgtcagtacctctcattctgaccatactggcgggggcagccacgtttattggcgcgtttctcggcgttctcgggcaaaaaccctcgaaccgcttactggcgttttcgctaggttttgcggcggggatcatgttgctcatctcattaatggaaatgcttcctgccgcactagcagctgaaggaatgtcgcctgtgttgggttatggaatgtttatcttcggtctgcttggctattttggcctggaccgcatgttgccacatgctcatccgcaggatttaatgcaaaaatcggtgcagccgttgccaaaatcgatcaagcgcacagccattctgctcactctcggcatcagtctgcataacttcccggaagggattgccacctttgtcacggcgagcagcaacctggagctgggatttggcatcgcactggccgtcgcgttgcacaatatccctgaaggtctggcagtggcaggcccggtttatgcggcaacggggtctaaacgcaccgcgattctgtgggcggggatttctggactagcagaaattcttggtggtgtgctggcgtggttaatcctcggtagcatgatttccccggtggtcatggcggcaatcatggcggcggttgcaggaattatggtggcgctctcggttgatgaattaatgccgctcgccaaagagattgaccctaataataaccccagctatggcgtactatgtggaatgtcagtgatgggattcagtttagtgctgctacaaacggcgggaattggttaaaaacaacatcagaagttgtccagcgcatggacaacttctgccagcttcacgaaagccttattctaccttttcggctgtctcttctctcgtactgtttaagtatttgttccgcgcttcaagcagtgcgtctctgtcctggcgaaacgcccgacaataacgtttcaaatgcaggaaataacccaccacaaccagagcaatcaatacaatccagtaccaggcgataaacatccttttacccttaatatttaacaatactaaacatttagcgtataaatttcacatatcctttttcggatatattcatatggtcgcataataacggaacaattatatgattttgatcataatgaaaaagaatgcctgatattaatgaaattttctcatagaaagagaagcggaattaacatcttgcatagcagggaaaaataaaaaccgaagcctgctacaacttcggtttcttgattaaggcagtaaattaagcagcggttttcagctggctttacgctcatgtgcctgacggtatgccaccaggtcttcaatagtcacgagcgccatattgtgtttattggcaaactcaatacactctggtgcacgcgccatcgtgccatcgtcattagtcagctcacacagtacaccagccggtttaaagcctgccagcgtcatcagatcaatagttgcttcagtatgaccgccacgcgtcagtacaccacctgcctgagcgcgaagtgggaaaacgtggccaggacgattcagatctgacggttttgcgccatcggcaatcgctgcgcgaacggtcgtaatacggtcagcggcagaaacaccggtagtcacaccttcagctgcttcaatggtcacggtaaaaccggtgccataggcgctggtgttattttctaccatcattggcagatcgagttgtttacggcgatcttcagtaatgcacaggcaaacaataccgctaccgtggcgaatggtcagcgccatctgctcaacagtcatggtttctgccgggaagatcatatcaccttcgttttcacggtcttcatcatcaagcaccattacaccgcgtccttcacgcagcgcagccagtgcattttcaacacgttcgaaaggcgtaccaaaagaggaaagtagcgtctgattcatggtaaaaaaacctcactaaaattatggttaccagaatcagggcagtcttaggagtggcggcatatagccaaaataacgtgagcgggtccatgcccgacagaatcgttactctctcccatccggactctaaccgtcggccccggaattacaccggatctgctgtcctttgagttcgcacccaaagcgctcgcgggctttcaactgagttgatttaccgccggtggggaatttcgccccgccctgagaataagcggattcactataacgctaatgattagcggcagcaacgcatagcttcacataattctggtttatgacttacccttatcgcactacaatggcactcaacacctatcagtacagggaaactacaatgattgacccgaaaaaaattgagcaaatcgctcgccaggttcacgaatcaatgcctaaaggaatcagggagttcggggaagatgtggagaaaaaaatccgccaaaccctacaagcgcagctgacgcgcctcgaccttgtaagccgtgaagagttcgacgtccaaacgcaagtcctgttacggactcgtgaaaaactggcgctgcttgaacaaagaatcagcgaactggaaaatcgcagtactgagatcaaaaagcagccagatccagagactctccccccaacgctgtaaacattcgtctttaatgcactgtaaattatgaattaatcctctaatttatagtgctttctattaccttatcgcgtaatcccattcagaaaaccatcacaaaaatgaatgagtacaattgaaagtataattgcaatgtattttttaagttttacttaatcgatatttagataaactaattttataaaaaacacaaaataaaatatcatatttcaatgattagtagtccttaaataacagttactaatcattctcttttctacttatctttatataaaggaatattatgtccgcttttaaaaagtcacttcttgttgctggcgtagcaatgattctttccaataacgtgtttgctgatgaaggtcacggtattgttaaatttaaaggtgaagttatctctgctccatgttctattaaaccaggtgacgaagatttaactgtaaatctgggtgaagtagcagataccgtactgaaaagcgatcagaaatctttggctgaacctttcactattcacctgcaggactgcatgctgagtcagggtggaactacttattcaaaagcgaaggttactttcactacagcaaataccatgacgggtcagtctgatcttctgaaaaataccaaagaaactgaaatcggcggcgccactggcgttggcgtacgtattctggacagccagagcggcgaagtaactttaggtactccggtagtaattacgttcaacaataccaacagctatcaggaactgaatttcaaagctcgtatggaatccccaagcaaagatgccaccccgggcaacgtttacgctcaggctgactacaagattgcttacgagtaatcgcatttggccgggttcgcccggccacatcattaacggattaatgataagtggatcagatgtataaaaaattaaaattaaccacaataagcgaattgattaaaaatatttattgttcattatccgttattagactggccccctgaatctccagacaaccaatatcacttaaataagtgatagtcttaatactagtttttagactagtcattggagaacagatgattgatgtcttagggccggagaaacgcagacggcgtaccacacaggaaaagatcgcaattgttcagcagagctttgaaccggggatgacggtctccctcgttgcccggcaacatggtgtagcagccagccagttatttctctggcgtaagcaataccaggaaggaagtcttactgctgtcgccgccggagaacaggttgttcctgcctctgaacttgctgccgccatgaagcagattaaagaactccagcgcctgctcggcaagaaaacgatggaaaatgaactcctcaaagaagccgttgaatatggacgggcaaaaaagtggatagcgcacgcgcccttattgcccggggatggggagtaagcttagtcagccgttgtctccgggtgtcgcgtgcgcagttgcacgtcattctcagacgaaccgatgactggatggatggccgccgcagtcgtcacactgatgatacggatgtgcttctccgtatacaccatgttatcggagagctgccaacgtatggttatcgtcgggtatgggcgctgcttcgcagacaggcagaacttgatggtatgcctgcgatcaatgccaaacgtgtttaccggatcatgcgccagaatgcgctgttgcttgagcgaaaacctgctgtaccgccatcgaaacgggcacatacaggcagagtggccgtgaaagaaagcaatcagcgatggtgctctgacgggttcgagttctgctgtgataacggagagagactgcgtgtcacgttcgcgctggactgctgtgatcgtgaggcactgcactgggcggtcactaccggcggcttcaacagtgaaacagtacaggacgtcatgctgggagcggtggaacgccgcttcggcaacgatcttccgtcgtctccagtggagtggctgacggataatggttcatgctaccgggctaatgaaacacgccagttcgcccggatgttgggacttgaaccgaagaacacggcggtgcggagtccggagagtaacggaatagcagagagcttcgtgaaaacgataaagcgtgactacatcagtatcatgcccaaaccagacgggttaacggcagcaaagaaccttgcagaggcgttcgagcattataacgaatggcatccgcatagtgcgctgggttatcgctcgccacgggaatatctgcggcagcgggcttgtaatgggttaagtgataacagatgtctggaaatataggggcaaatccagttatcatcattggttgtgcgtcagcttatgccgttgaattcaacaaagatttaatcgaagccgaagatcgtgaaaacgttaacctttcccaatttgaaactgatggccaattacccgtcggcaaatattcactaagcactctgattaataataagaggacgccaatccaccttgacctccaatgggtattaattgataaccaaactgcagtttgcgtgacaccagagcaattaacattattaggatttactgatgaatttattgaaaaaactcagcaaaacctgatcgatggttgttaccctatcgaaaaagaaaaacaaattacaacttatctcgataaagggaaaatgcaattatccatatctgcacctcaggcatggttaaaatacaaagatgcaaactggacgcctcctgaactttggaatcatggtattgctggggcatttcttgactacaatttatatgcctctcattatgcaccacatcagggcgataattcgcaaaatataagttcctatgggcaggctggggttaatcttggggcctggcgcctgcgtactgattaccagtacgatcagtcatttaacaatggcaaaagccaggcgaccaacctggattttccgcgtatttatttgtttcgcccaatcccagcaatgaatgcaaaactaactataggtcaatacgatactgaatcctctattttcgactctttccatttttctggcatttcgttgaaaagcgatgagaatatgttaccgccagacctacgtggttacgcaccgcaaatcacgggtgtcgcacaaacgaatgcaaaggtcactgtctcacagaacaaccgtattatttatcaagaaaatgttcctccaggcccatttgctattaccaatttattcaatacattacaggggcaacttgacgtcaaggttgaagaagaggacggacgcgttacgcaatggcaagttgcatctaatagtattccttatctgacgcgtaaagggcagattcgctacaccactgctatgggtaaaccgaccagcgttggtggtgattccttacaacaacccttcttctggactggtgaattctcatggggttggctgaacaatgtatccctgtatggtggttcagttttaacaaaccgtgattatcaatctctggctgccggcgttggttttaatcttaactcattaggttcattatcttttgatgtcacacgatctgatgctcagttgcataatcaggataaagaaacgggttatagctaccgcgctaactattcaaaacgttttgaatctaccggtagccagctcactttcgctggttaccgtttctctgataaaaactttgtgacaatgaatgaatatatcaatgacactaaccattacacgaattatcagaatgaaaaagagagttatattgtcacgtttaaccagtatcttgaatcattaaggttaaatacatacgtaagtttggctcgtaatacttactgggacgccagcagtaatgtgaattattcattatcacttagccgcgattttgatatcgggccattaaaaaacgtctccacttctctaacatttagccgaataaactgggaagaagacaaccaggatcaactgtacctaaatatttcgattccctggggaactagtagaacattgagctatggtatgcaacgaaatcaggataatgagatttcgcatactgcttcgtggtatgactcttccgatcgaaataattcctggagcgtttctgcttcaggcgacaatgatgaattcaaagatatgaaagcgtcactacgcgccagttatcagcataataccgagaacggtcgactctacctctccggtacatcacagcgagacagttattattctctgaatgccagttggaatggttcattcactgcgactcgccacggtgccgctttccacgactatagcggtagtgctgactcgcgttttatgatcgacgcagacggcactgaagatattccgttgaacaataaacgcgcggtaactaatcggtatggcatcggagttattccatcagtcagcagttacataacaacatcattaagtgttgatacccgaaatctgccagaaaatgtggatatcgaaaactcggttatcaccaccaccttaaccgagggtgctattggctacgccaaacttgatacccgcaagggctaccaaatcataggggttattcgcctggcagatggtagtcatccaccactggggattagcgtaaaagatgaaaccagccacaaagaattaggactggttgctgatggcggctttgtatacctcaacggcattcaggatgataacaaacttgctttacgctggggtgacaaatcttgttttattcaaccacccaatagcagcaacttaaccaccggaacggctattttaccgtgtattagccaaaattaattcaggatgaaactaatgcgctacttaaatacaaagaatatcattgcagcaggagtattactctcctgtatgagcagcattgcctggggtgccatcatcccggatcgtacccgtatcataatgaatgagtcagataaaggcgaagcattaaaacttactaatcaaagtaaaaacctgccctatctggcccaaacatggatagaagatacgaaaggcaataaatcgcgtgactttattgtcactgttcctccaatggtgcgtttaaatcccagtgagcaaattcaaataagaatgataactcaggaaaaaattgctcaacttcctaaagacagagaaacgctcttctattttaacgtgcgagaaataccgcccaaaacagataaaaaaaatgtgatgcaagtcactatgcagcacgcattgaaactattctggcggccaaaagccattgaattagaagacgatggggtaatgacttacgaaaaagttgaaatcattcgtagaaatgacggttcgatccgctttaacaataagatgccttatcacgttacgctgggttatatcggaacaaatggggtaacgatgttaccacaaacgcaaagcttaatggtaaccccttttagctatgcaaatacgcagtttaaaaatgttccgtcaacttttcaggtgggttatatcaatgactttggtggattaagtttttatgaaataaactgccctgtagtaaataacatttgtaatatttctgtagccaaccgagatcaataatatgcgctacttgttaattgttattactttttttatgggttttagttcattacctgcatgggcaatggactgctatgctgaacatgaaggtggaaataccgttgtcattggttacgtaccaagaatctctatccccagcgatggtaaaaaaggtgataaaatctggcaaagcagtgaatattttatgaatgttttctgtaataatgcactaccaggcccatctccaggagaagaatacccatctgcatgggcaaatataatgatgttgttagcatcaggtcaagacttttataatcaaaactcttatactttcggtgtaacttataatggggttgattatgattctacatctccactacctattgcagcacctgtatgtattgatataaagggagccggaaccttcgggaatggctacaaaaagcccgcagtctgtagtggcggtcctgaaccgcaattatcagtaacttttccagtacgagtgcagctatatattaagctagctaaaaatgccaataaagtaaataaaaaacttgtattacctgacgaatatatagcacttgaatttaaaggtatgagcggagcaggtgctatagaagtagataaaaatctgaccttcaggattcgcggattaaataacattcatgtccttgactgctttgttaatgttgatctggaaccagctgatggcgttgtcgactttggtaaaataaattcccgaacaattaaaaataccagcgtgagtgagacgtttagcgtagtcatgaccaaagatccgggtgcggcctgtactgagcagtttaatattttagggagttttttcactacggatattttgagtgattatagccatctggatataggtaatggtctgctattgaagatatttcataacgatggaacagcaacggaatttaaccgcttctcacaatttgcttctttttcatcgtctagtgcgccttcggtcaccgcaccattcagggcagaactgagtgcgaacccggcagaaacggttgttgagggaccgtttagtaaagacgtaatcctgaaaatcacctataactagtatctaatacaaacactaaaacgggccatcaggcccgttatatcagtgctctaactccagctctcttgcctgcatcatctgttgacaataccaggcataacgtgcgcaaaaccaggttctatgttcttcatccatgttaccagtaacggccagaatatcgaccgggcgaccttctgcgtgcattctggcaaaactacgcgccaggaaatcgaaattatttaaagaattaagactatgatccataagcacatcctccggttatcgcataccttttaaggccatatgctttttctgatttcagtattccccaatcagtgtagtgcctttaaacataacgtgcgtaaatatattgtccccgatcacactttttagtgaaaaataaaaaaccatattaaaagactttctcttccagaacttctctaacctgtgttattattaacacagataaatgtaagcaaggaaactattacaaagtaaatattgcgtcactaaatggacattggagtgatatatgattttattcgccgactataacaccccttatcttttcgctatttcctttgtactgttgatcggcctgttagaaatttttgcgcttatctgcggtcacatgctctccggtgctcttgatgcacatcttgaccattatgattctataaccacaggtcatattagccaggcacttcattatctcaatattggaagattgccagctctcgtcgttctctgcttactggctggtttttttggtcttattggcatcctgttgcagcatgcctgcatcatggtctggcaatcaccactgtcgaacctgttcgtggttcctgtcagtttactgtttacgattattgcggtgcattataccggtaaaatagttgcgccctggattccacgcgaccatagttcagctattacagaagaagaatatattggtagcatggcgttaattaccggtcatcaagccacttcaggtaatccctgcgaaggaaaactcaccgatcaatttggccaaatacattatttactactggagcctgaagaaggaaaaattttcactaaaggagacaaagtgttaattatttgccgactttctgcaacgcgatatttggcggaaaataatccctggccccaaatattgtaatttattaatcaaaaggaaatttaataatggatgatattgttaattctgtgccctcctggatgtttaccgcaattattgccgtatgcattctgtttattattggaattattttcgccaggctctatcgtcgcgcttcggcagagcaagcttttgttcgtactggtttaggtgggcaaaaagtggtaatgagcggtggcgcaatcgtgatgccgatctttcatgaaataatccccatcaatatgaatactctgaagctggaagtcagccgctcaaccattgatagcctgattacgaaagatcgtatgcgcgtcgatgtagtagtcgctttctttgtgcgggtaaaaccttcagtagaagggattgccaccgctgcccagacgctggggcaacgcaccctgtcgcctgaagacttacgtatgttggttgaagataaatttgtcgatgccctccgtgcaacagctgcgcaaatgaccatgcatgagttacaggatacccgcgagaactttgtgcagggggtgcaaaatacagtggcagaagacctgtcgaaaaacggtctggaactggagagcgtttcacttaccaactttaaccagacctcgaaagaacatttcaatccgaacaatgcctttgacgccgaaggtttaaccaaactgactcaggaaacagagcgccgtcgccgcgaacgtaacgaagttgaacaggatgtagaagttgcggtgcgtgaaaaaaatcgcgatgcgctatcgcgcaagctggagattgaacagcaagaagcgtttatgacgcttgagcaggagcagcaggttaaaacccgtactgccgaacagaatgcacgtattgcggcttttgaagctgaacgtcgtcgtgaagcagagcagacacgaattctggctgaacgacagattcaggaaacagaaatcgaccgcgaacaggccgtccgctcaagaaaggttgaagctgaacgtgaagttcgcattaaagagatcgaacagcagcaggtcaccgaaatcgctaaccagacgaaatcgatcgctattgccgccaaatcggaacaacagtcccaggcagaagcgcgtgctaatctcgcacttgcagaagcggtaagcgcccaacaaaacgtagaaaccactcgccagactgccgaagccgatcgtgctaaacaagttgccctaatcgctgccgcgcaggatgcagaaaccaaagcggttgaactgaccgtgcgggcgaaagcagaaaaagaagccgcagagatgcaggcggcggctatcgttgagttagccgaagctacacgtaaaaagggtctggcggaagcagaagcacaacgtgcgctgaacgatgctatcaacgtactttctgatgaacaaaccagccttaaattcaaactggccttgttgcaggcgctgcctgcggtaatagagaaatccgttgagccgatgaagtcaatcgacggtatcaagattattcaggtcgatggtctgaatcgtggcggcgctgcgggtgatgcaaacacgggtaatgtggggggcggaaacctggcggaacaagcattatcagccgctctctcttaccgcacacaggcaccgctgattgactccttgctcaatgaaattggcgtttcaggcggctcactggcggcattgacttcacccttaacctcaacaactcccgtcgaagaaaaagcagagtaaaccctcttccaggaataatccctggcccaaaaagccggggattttttatatctgcgttccgctaaaaagtgcaaatgatcaggttgttgcagcattttgcgtgacggctcggggaaggcaaaactgcatcagagaaagcattgcgtggggtctggcgctcatcaacaatcggggagtcagcagggggctgaaacgggaaagcccctcccgaagaagggggccttacagaaggaaagggttatgatgaagctcgtcatcatactgattgtgttgttactcgtaagtttcgcagcttattaacagccaatcagaggggggagaaatcctccctcacccttgttcctttactttaggttgaaaaaaaatcagcgtcaagaaggtttcattaacacatatccctggcccaaaaagccggggattttttatatctgcgttccgctaaaaggtgcaaatgctcaggacgttgcagcgttttgcgtgaccgctcggggaaggcaaaattgcctctgggaaagcattgcgcggggtccggcgctcatcaacaatcggggggcagcaaggggctgaaacgggaaagcccctcccgaagaaggggccttgtataaggaaagggttatgatgaagctcgtcatcatactggttgtgttgttactgttaagtttcccgacttactaacaactcatcagaggggggagaaatcctcccttacccttgttcctttactctaggttgaaaaaacaacagcgtcaataggcctgccatgtacgaagcgagatctgtgaaccgctttccggttagccttttttatcctgttggatcttcttgatgatgttggtcgtcgagcaaccgtcttcaaagttgagcaccaacacttcgccaccgttggcccagacttctttactcccggcaatctcttctggtttatagtcgccgcctttcaccagcagatctggcaagatcccggcgatcaagcgctgcggcgtgtcctcttcaaacgacactacccagtcgaccgcttccagtgcgcccagcacaatcatacgctgttcgagtgggtttaccgggcgggaatcccctttcagccgtttggtggaggcatcgctgttgacggcaacaatcaagcggtcacccagcttgcgggcatttgccagataagagacgtgcccggcgtgcaggatgtcaaagacaccgttggtcatcaccactttttcaccacgtttacgcgctgccgctacggccagcttcagttcctcttcggtcatcacgccaaagcctgtatctgcacgtccacgtacagcattttccagctcgatcggcgaaaccgtggaggttcccagtttgccgaccaccacgccagccgccgcattggcaaagaagcaggcttcttccagcgaattacccgctgccagcgttgccgccaggacgccaatcaccgtgtcgcccgcaccggtaacgtcatacacttcctgcgcttgggttggcatatgcagcggcgctttacccggttgcagcagcgacataccctgttcggaacgggtcactaacagagccgagagttcgtaatcggcaatcagtttcatgccgcgctcaacaatctcttcttcggtcttacatttaccgacaacagcttcaaattccgagagattcggcgttaacagcgtagcgccgcggtagcgctcaaaatcggtaccttttggatcaatcagcaccggaacacccgctttacgcgccagttggatcatctgctgtacgcttgccagcgcacctttggcgtagtcagaaagcaccagcgcgccaatcgaactcagcgcctgattaatccgctcgtgcagcggctgcggatcaacaccttcgaaaccttcttcaaaatccagacggatcagctgttggttgcgggaaagtacccgtaatttggtaatggtcggatgcgtcggtacagaaacgaagtcgcatttgacgttgacgtcggccagagatttactcagcgcgcgcgctgcatcgtcaatgcccgtcaacccgaccaggcgtgcattagcaccgagagaagcgatattcatcgccacgttagccgcgccgcccggacgttcttcgatggtattcactttaaccacgggcaccggcgcttccggcgagatacgactggtggggccgtaccagtaacgatccagcatcacatcaccaaccaccatcactcctgcacgttcaaactctggcagcgttactttcattcctgtctcctgagagattcaaaatttgcgcgcgataataccatacttcattcttccaccagccacttctgccagcttgcccgcaccagttcacgctctgcggtgaagcaatcctccgacacatggcccggcaattcctgtaatgccagatgatgaagttcatcgcgaagcgtagtgtaagcacgggtcagcgccatcgcttcctgctcttccataatgtcgttttgcgccagtagttccagaatacgcacgttgtctgaccagcgcgttaacttcggtttttcatgagcgtagcgcaacaccagatattgggtaataaattcgatatcggtaattcccccttcatcagctttgatatcaaagcgatcgcgatgtttattgccgagatgagcgcgcattttctcgcgcatttcccgcacttccgtttgcagagttttaccttcacgcggcagcgtcataatctcgcgacgcactgcgtcaaagtgcgcggtgagctgcggatcgccgtacactacacgcgcacgcaccagcgcctgatgttcccacgtccaggcctcgtttttctgataatcggcaaatgcttctgcggatgtcaccagcattcccgccgccccggacggacgcagtcgagcatccacttcatacaaaatgccggaagaggtacgcgtactgaacagatgcataatgcgttgcgccagacgcagataaaactgccgcccgtcgatttcccgctcaccgtcagtcatcgcatccattgggcaatcatggaggaagataaggtcaagatcggaactgtagcctaactcccagccgcccagcttgccgtagccgaccaccgcaaaaccacgcccttcgcgttcgttcaggtgattcggcttaccgtagcgggcaaccatttgaacccacgcctgctgaacgacggcatctatcatggcttccgccagccaggttaagtgatcgctcactttcatcaccggtagcgtaccggcgatatccgctgcggcgatgcgtaacagctgcgcctgtttgaactgacgcagcgcctcaagctgttgctcttcgtcatcttccggcacgcgcagcaaatactggcgcaactcatcgcggtaggcatcggtcgccgtcggctggtaaagggtgtttggatcgagcaattcatccagcaataatggataacgcgccagctggctggcaatcatcggcgacgcggcacacagagaaatcaaatgtttaagcgccgcggggaattcactgagcaattctaaataggtggtgcgggtaacaatccccaccagcaaggcggtaatgcgcgacagcgtaacggcagcgtcttcacgcgcacagacatcacttagcagatgcggcatcagatggtcgagcacctgacgtcctcgcggcccgatggtgcgcttatccagctctttgcggaaatcggcaatcagcgttagcacctgtttgcgatcatcctcgctaagatgcgccagcactggcgtagtgtcatcttcctgcaacgcatcctgccacagctcacgccactgttccgacagcgactcttcctgagtttcactttcatcgtcgccaatcaattcattaaacacccggcgcacattggtcatatgtgcggtcagcgccccggtcagttgcggccagtcagcaaagtccatcgcccacgccagccgcgcacgattaagctcatcagaaggaagcgtctgggtttgttcgtcgttaatgctttgcagcaggttttccagacgccgcaggaacagatacgccactcgcaattgttcagcatcgttttcagaaagcagatgcagctcggcaatggcgctgagcgttggcagtaaagagcgcgattgcagcgacggttcgcgtccgccgcgaatgagctggaacacctgaacgataaattcaatttcgcgaatgccgcctgcgccgagtttgatattgtcggtcaaaccacgtcgacgcacttcacgggcaatcatccctttcatgttgcgcagcgactgaatcacgctgaaatcgatgtaacgacggaaaacaaacgggcgcagcatcgcacgcaactcgttagcatagacgccttcgctatcgcccataatccgcgccttgaccatcgcgtaacgctcccagtcgcgcccctgctcctggtaataatcttccaacgcggcaaagctcagcaccagcgggccactttcgccaaacggacgcagccgcatatccacgcgatagacgaagccatcctgcgttggttgatccagcactttaatcagccgctgccccatgcgggtaaaaaactgcgcgttatccagttcccggcgtccaccctgcgtacaaccatgttccggccaggcaaaaatcagatcgatatcagaggagaaattcagctccccaccgcccagcttacccatgcctaaaatcagcagcggttgcgcttcgccctgcgcattgcacggcgttccccactcgcggcagcaggcgtcatacagccagtcacgcgccgcaacaatcagcgtctccgccagatagctgagctgctgcaatatgctctcttcagtaaccagtgccagcgtttgcgcccaggcgatgcgcaccataatgcgccgccggaatagccgcagctcgcgcattaacccggcttcgtcactcacattacagagcgcctcctgcaaccatgccgcgtaatgctgccattcgtcggcctgcggcggttggctttccagttccgtcagccactctggatgcgcaatcacgctgtcctgcacaaaatcactaaaagtaagtactgacttcgcctgtgcgctaagtgattcctcggctaaaggctctggcagccgctcaacaacggtctgccagtactgctgtaacggtgaagagagcggcttcataagcgattttatccttgcctgattaacgttttccgctgtgcaaccagaacggttcctgattgtttgcctcattacggaaatgttcaatttcgatgcgttgcccggtcgcaatagcgtgatgcagcccctgccagttctccagccaggcttgcgcgacgacaggatcatagtaacccgccagcaacagtattgagtcaatatcacgcgtcaggcgtggcaactggtcacggtagcgatcgcctaacggctggcagaaaacgcttttcagttcagcggcatggcgggaaagatggatatcggcaaagcgtttgaaggagtcgctgattttgccctgcgctttggcatctaaaaatggctgccatgctttgcttaccaaccattcggtcaacgccagcttcgccattgccgtttcggtagagtagaccgccgtcacggcagacaccgcagaagcaatggtcgcctcgcattgagtcagcagatcacgtaagtgagtgctcgctttacgcggcacaataccaccgaacagcatcagcgtatgacggaccaggctaatggctgccagcacctgttctttcgccgcatcgttgccgcgtacccacagttcttcatgatactgccattgcgctaacgccagctcgagcgccgcttccagcccctgttccacatcggcttttgccgcaacatgcaaaatggtggtcggtttgatttcacgcgccggattgccctgcgccagatgatagccacgcgccgctttgctcaggctgccctggcgtaatccggtttgcgataccagttggttcgccagtttcagcaccgcgcgcgtgtcgccgctaagcagttccagttccagctcacagataggttcagcaaattcacccgctttcacttccccctggtcgagggcgatttcaatttggctaccatcgaccgccaccagccatttttcgcgataaaaatcggtgctgaacagcggctgcacgcgggaggcgagatcggcgggcaattcgccgttcggccagacttccgtcggtaactgcgccaggtcgagcgtcggttcgctcaacgccacgttatattccgggcgctgatgtaagccgcctgtcactcttcctgcaactttcatggtcatctcatagcgaccgttttcgccacgaatacgtaagcccatatcgtgcccacgcagccagttatccggcgtttcgtagtaaatattcagcaactgcacggggtcatggtgctcgccgcccagcgtattgagatggtcacgcaacgcctcaacggcactgtgattaacaataaactttaattcgatttcctgagccatggcctttacttatcggttatgtcacataagtgacgatgaacggcgaacttaatgcgatcttttttgtcagtagatagtattttgcgccaaattgccatgcaacgggcaatttgacgggcgtaaaagtttgaagcagtggcaagacctgacacagaggattccgattgatgtcgaatgctttgcgtagcgacactgatgccactactatcgttccactttccatgacaataacgacagcctgatgccaaaattacgcctgatcggattaactttactcgcacttagcgcgactgccgtctcacacgctgaagaaacgcgctatgtttccgacgaactgaatacctgggtccgcagcggtccgggagatcattatcgcctcgtgggcacggttaacgccggcgaggaagtgaccttattacaaactgacgccaacaccaattatgcccaggtgaaagacagctctggccgtaccgcctggatcccgttgaaacaacttagcactgagccaagcctgcgctcccgtgtgccagatctggaaaatcaggtcaaaaccctgaccgataaactcaccaatatcgataacacctggaatcagcgcaccgcagaaatgcagcaaaaagtggcgcagagcgacagcgtgatcaacgggttaaaagaagaaaatcagaaactgaaaaacgagctgattgtcgcgcagaaaaaggtcgatgccgccagcgtacagctggatgacaaacagcgcaccatcatcatgcaatggtttatgtatggcggtggcgtgctggggcttggcttgctgctcggtctggtactgccgcacctgatcccaagccgcaaacgcaaagatcgctggatgaactaaatcgccttcttcgttgcactgtcttattattaggaattgtgtatttgacgaagggatgatggcgtgaagatttatctggtcggtggtgctgttcgggatgcattgttagggctaccggtcaaagacagagattgggtggtggtcggcagtacgccacaggagatgctcgacgcgggctaccagcaggtaggccgcgattttcctgtgtttctgcatccgcaaacgcatgaagagtatgcgctggcacgtaccgaacggaaatccggttccggttacaccggttttacttgctatgccgcaccggatgtcacgctggaagatgatcttaagcgtcgcgatctgaccattaatgcgctggcccaggacgataacggcgagattatcgacccgtacaacggtctgggcgatctgcaaaatcgtctgttgcgccatgtttcccccgcttttggcgaagatccgttacgcgtattgcgcgtggcgcgttttgctgcgcgttatgcccacctcggttttcgtattgccgatgaaactctggcgttgatgcgcgagatgacccatgcgggtgaactggaacacctgacgcctgaacgggtatggaaagagacggaaagcgccctcaccacccgcaatccacaggtgttcttccaggtactgcgcgattgcggcgcactgcgcgttttattcccggaaattgacgcactgtttggcgttccggcccctgccaagtggcatccggaaatcgatacgggtattcataccttaatgacgctctcaatggcggcgatgctgagtccgcaggtcgatgtccgtttcgcaactttatgccacgatctcggtaaagggctgacgccgccagaactctggccgcgtcatcatggtcatggcccggcgggtgttaagttagtggaacaactatgccagcgtctgcgcgtgccaaatgaaattcgcgatttagccagactggtggctgagtttcacgatctcatccacaccttcccaatgctgaacccaaaaaccatcgtcaaattatttgattccatcgatgcctggcgtaaaccgcagcgtgtcgagcaactggcgctgaccagcgaggctgacgtgcgcggcagaaccggttttgaatcagcggactacccgcaaggccgctggttgcgcgaagcctgggaagtggcgcagtcagtgccgacaaaagccgtcgttgaagcgggatttaaaggtgtggagattcgcgaggagctgacccgacggcggattgcggcggtagccagctggaaggaacaacgttgcccaaagcctgaatgagtattgggcattttgccggatgcggcgtaaacgccttatccggctacatgtcaacgacagttgtaggcctgataagacgcgcaagcgtcgcatcaggcgttgattgccggatgcggcgtgaacgccttattcggcctacgcaatcgttgacaacgccaagcatccgacactattcctcaattaaaagaacacgacatacaccgcagccgccacaataaagcgataaatggcgaacgggataaacgaaatgcgcttaatcaattgcaggaaggttttaatcgctatcagcgccaccacaaaagcggtgataaacccaacggcaaacatcgggatatcgccgcttgtcaggaagccccagcttttgtagagatcgagcgccgttgcgcccatcatcatcggcaccgccagcaggaacgaaaactcggaagcagcgtaacggctcacccccatcagcatcccacctgaaatggtcgccccggaacgggagaaacccggccacagcgccagacactggaaacagccaatcataaatgcctgacgataggtcatatcatcaagacccggcgcacgcggctctttcggcttcaggcattcggcggcaatcagcaacaaaccgccaacgaccagcgcatacatcacatttatcgggttaaacaatgacttaatcgtgtcgtggaacaacagccccaataccaccgccggaatcatccccagcaaaatgtggatcagcgttaaacgacctttgctttcaccttcgtgctgcaacgggcggccaaagtggatgccaatcaggccaaacagacgccgccagaacatcactactaccgccagaattgatcctaactggatcacaacttcaaaggttttcgccgtgtcgccctcaaaccccaacaagtgaccgacaataatcatatggcccgtgctggataccggcagaaattctgtcaatccttcgaccacacccaatattgccgctatcagcagcgagtgcatatcgctcatcaataaacccctaaattattaaaatgtaccgcttgtccgaactactgcgtatgaccaggttataaccgtttggtttaacagctgtaaaattaattattttctttcagattattgccacgctcaatgattacgccaacattcgccgcccgcgccactgcgcctggcttgctgagtttgatacgcacccacggcgagttgaagcgtgctaacagcagctccgccacctcttcagccacgcgttccaccagcgcaaaacgcgccccctcgacgtggctgaccaccgtttctgcaatgtcagcgtaactgaggcaatccgccacatcatcacttttcgccgctttacggttatcccacgccatttcgatatcgaacactaacttctgttcgatggtctgttcccagtcgtaaacaccaatagtggtgattaccgaaagttgctctataaatacaatatccatcacgtcctgcctgctttttggctaaccggataccacttccggcgaaatgtgcgtattatccacagattcatcgttgaacacgaattttcaaaacggaacagcttatgagtgcaatcgcgcctggaatgatcctcatcgcgtacctctgcggctccatttccagtgccattctggtttgccgcttgtgtgggctgcccgatccgcgaaccagcggctccggcaatccaggcgcaaccaatgtgttacgtatcggtggcaagggagcagccgtagcagtactgattttcgacgttctgaaaggaatgttgcccgtctggggcgcgtatgaattaggtgtcagccccttctggctaggcttaattgccatcgccgcctgtcttggacacatctggcccgttttcttcggatttaaaggaggaaaaggcgttgctaccgcttttggtgccatcgcacccattggctgggatctcaccggagtaatggcgggaacctggttactgaccgtgctattgagcggatactcgtcgctgggagcgattgtcagtgcactgattgctccgttttatgtctggtggtttaagccacaattcaccttcccggtttcgatgctctcttgcctgatcctgctgcgtcatcatgacaacatccaacgtctgtggcgtcgtcaggagacaaaaatctggacgaaattcaaaagaaagcgcgaaaaggatcccgagtgatttctggtggatctacatgacctgatagccttcatcgggcttgcccagccgttgctggcaccatgccgccagaaattccacgcagacacgtaatttcatgctgcgatagagcggctcccggtaaacagcccagatattggcgctttgtgcatactctggcaatacttgcaccagtttgccactctccagaaacggcaacacatcccactcggaacgcagcataatccctttgccctccagcgcccattgcagcacaatctcgccgctattggaggaaagatgcccgcttaccttcaccgattttttctcctgaccgttccccaactcccatattccatgggtcatatcgcgctctttggtcaccagacagtcatgacgacttaattcctgtagggattgtggctgcggatatttttgcagatactcaggtgctgcgcataatattcttttattttttgtcaaaagatgcgcaatataataatcaggaatttcgtcattaatacgaatatccagatcaatattatcctgcactaaatcaatttgccgatcgaacaattcaaaatgcacctgtaactcaggataattgcgcatcagttcggtaatagctggcgcaatatggctgcgcccaaaaccaaaactgcaaccaatacgaatcatcccctccgggcgcgttttgatttgcgtgacgtcatcgaccagtcgctgatattgggtgaggatttccaacgcatgttcgtaacaacgttggccactttcagtcagcgccacgccgcgagcggagcggttcagcagcgttgttgccagcgtattttcaaggatttggatccgcttggtgacaaatgcaggcgtctgcccaagcgtcgccgctgcggcgctaaaactcccgctgtgaacgatttctaccagtacctgcaagtctttggctaaaggccagctattcagcatcgttaattatccgcagttgtgataagcgcagtgtatttcgcaaaacattgccattccctgctctggcgcaatattcattcttattttcgcgttgattcacgaactgttaattacatattcacggtggcaaaaaatataaaaccacatttttagtggtagtttgtggcggtgaatttttccagacaaatacaaaaactggagttgccatgatgagcgaaagtaataagcaacaggcagtgaataagttgacagagattgtcgctaactttaccgccatgatttctacccgaatgcctgatgacgtggtggataaactaaaacagctaaaggatgccgaaacgtcgtcgatggggaaaattatctaccatacgatgttcgacaacatgcaaaaagcgattgacctgaatcgtcctgcctgtcaggacaccggggagattatgttcttcgttaaagtcggttcccgcttcccactgcttggcgagctgcaaagcatactcaaacaagccgtggaagaggcaaccgtcaaagcgccactacgtcacaatgcggtagaaatttttgacgaagtaaacaccggcaaaaataccggtagcggcgtaccgtgggtcacctgggacatcatccccgacaatgacgatgcggaaatcgaagtttacatggcaggcggcggctgcacgctacctggccgctcgaaagtgttaatgccgtcagaaggctacgaaggcgtggtgaaattcgtcttcgaaaatatctccaccctcgccgtaaacgcctgtccaccggtactggtgggcgtgggcatcgccacctcggtggaaaccgccgccgtactctcgcgtaaagccattttgcgcccgattggcagccgccatcccaatccaaaagcggcagaactggagctacgcctggaagaaggactcaaccgtctggggattggtccacaagggctgaccggcaacagttcagtgatgggcgtacatatcgaatctgccgcccgccatccgtcaaccatcggcgttgctgtctctaccggctgctgggcgcatcgtcgcggcacgctgctggttcatgccgatctcacctttgaaaatctgtctcacacccggagcgcgttatgaaaaagatcctgacaaccccgatcaaagctgaagatctgcaagatattcgcgtcggcgatgtgatctacctgaccggtacgctggtgacctgccgcgacgtttgtcaccgccgtttgatcgaactgaaacgtccgatcccttacgatctcaacggcaaagcgattttccacgctggccccatcgtgcgcaaaaacggcgacaaatgggagatggtctccgtcggcccgacaaccagtatgcgtatggaaagttttgaacgtgaatttattgagcagaccggcgtgaaactggtggttggcaaaggtggtatggggccgctgaccgaagaaggctgccagaaattcaaggcgctacatgtgattttcccggcaggctgcgcggtgctggcggcaacccaggtggaagagattgaagaagtgcactggacagagctcggaatgccggagtcactgtgggtctgccgggtcaaagagttcggcccgctgattgtctctattgatacccacggcaacaacctgatagccgaaaacaaaaagctgttcgccgaacgccgcgatcccatcgtggaagagatctgcgagcacgtccattacatcaaataaccctcccggagaggctcacccctctcctttttcgcaggcataacacgatgaaaccttccactgaatggtggcgatatcttgcgccgctggcggtcatcgccattattgctctacttccggttcccgcagggctggagaaccatacctggctctactttgccgtttttactggcgtgatcgttggactgatcctcgaacccgtgccgggtgccgtggtggcgatggtgggtatatccatcatcgccatactctctccctggctgctgttcagcccggagcagctcgctcagccaggctttaaattcactgcaaaatccctctcgtgggccgtttccggtttttctaattcggttatctggctgattttcgccgcctttatgtttggcacaggctatgaaaaaaccgggcttggacgccgcattgcgctgattctggtgaaaaagatgggacatcgcacgctgtttctcggctatgcggtgatgttctccgagctgatcctcgcacctgtaacaccgtccaactcggcgcgtggtgcggggattatctatcccatcatccgtaacctgccaccgctctatcaatcacaaccaaacgacagcagttcgcgcagcattggctcgtacatcatgtggatggggattgttgccgactgcgtgaccagcgccattttcttgacggcgatggcaccaaacttgctgttaattggactgatgaaaagcgcatctcacgccacgctgagttggggcgactggttcctcgggatgttgccgctcagcattttactggttctgctggttccctggctggcttacgtgctgtacccgccggtactgaagtctggcgatcaggtgccgcgctgggcagagacggaactgcaggcaatgggcccgctctgttcgcgtgaaaaacggatgctggggctgatggtaggcgcgctggtgctgtggattttcggcggtgattatatcgatgccgcgatggtcggttacagcgtggtggcactgatgctgcttctgcgcattatcagttgggacgacattgtcagtaataaagcggcgtggaacgttttcttctggctggcctcgcttatcaccctcgccaccggactcaacaacaccggttttattagctggtttggcaaactgttagcaggcagcttaagcggttattcgccaacgatggtgatggtggcgttgattgtggtgttttatctactgcgctactttttcgccagcgccacggcgtatacctccgctctcgcaccgatgatgattgctgctgcgctggcgatgccggaaatcccgctgccggtgttctgcctgatggttggtgcggcaattggtctggggagcattcttacaccatacgccaccggccccagtccgatttactacggcagtggttatctgccaacggcggattactggcgactgggggcgatttttgggctgatattcctcgtattgctggtgattaccggcttactgtggatgcccgtggtgttgctttaagtgaggacggtgccggaaattgctctccggcacccaatagttttacgcagccggtaactccgccagcggccagcgcggacgcacgctaacgccgagatccgccgtcgcgcctgctttaaaccgcaccattccggcataggcgatcatcgcgccgttatcagtacaaaattccggacgcgcgtagaacacttcgccgcggcgttttttcatcatttcagccagcttcgcccgtaacgtacggttagcactcacgccgcccgccatgaccagtcgcttaaagcccgtctgatccagcgcccgcttgcacttaatcatcagcgtatcgaccaccgcatcttcaaaggcgcgggcgatatcagcacgcgtctggtcgtcggtgccgttgtcacgaatggtatttgccgcgaaggttttcaggccggagaagctgaaatccagccccggacggtcggtcatcggacgcgggaagacaaagcgcccggcagtaccctgagccgccattttcgacagtaacggcccgccaggataatccagccccagcagcttcgcggttttatcaaacgcttccccggcggcatcatcgatagactcgccgagcagctcgtactgaccaatgccagtcacgctgattaactgcgtatgaccgccggaaacaagcagcgcaacaaacggaaattccggcgggttatcttccagcatcggcgctaacagatgcccttccatatggtgtacagggatcgccggaacgtcccaggcaaacgccagagaacgccccacggtcgcgccaaccagtagcgcgccgactaatccagggcctgcggtataggccacagcatcaatgtcttttgccgttaaaccagactcctttagcgccgcctggatcaacggtacggttttacgcacatgatcgcgggaggccagttcaggcacgacgccgccgtagtcagcgtgcaatttcacctgactatacaattggttggctaacaaacctttttcatcgtcgtaaatggcgatgccggtttcatcgcaggaagtttcaatacccagtacacgcatgacttgttttacctcgctttattaccgcgcagtgtaggaccaatgcgggttgatgtaaaactttgttcgcccctggagaaagcctcgtgtatactcctcacccttataaaagtccctttcaaaaaaggccgcggtgctttacaaagcagcagcaattgcagtaaaattccgcaccattttgaaataagctggcgttgatgccagcggcaaaccgaattaatcaaaggtgagaggcacatgccggtaattaaagtacgtgaaaacgagccgttcgacgtagctctgcgtcgcttcaagcgttcctgcgaaaaagcaggtgttctggcggaagttcgtcgtcgtgagttctatgaaaaaccgactaccgaacgtaagcgcgctaaagcttctgcagtgaaacgtcacgcgaagaaactggctcgcgaaaacgcacgccgcactcgtctgtactaattccccgagagcgttgctctccgatcagaccgagttgtagttgtaaggccgtgcttccgaaaggaatgcgcggcttattttcgtttatgaattgctaaaaatcggggcctatggctggacgaatcccacgcgtattcattaatgatctgctggcacgcactgacatcgtcgatctgatcgatgcccgtgtgaagctgaaaaagcagggcaagaatttccacgcgtgttgtccattccacaacgagaaaaccccgtccttcaccgttaacggtgagaaacagttttaccactgctttggatgtggcgcgcacggcaacgcgatcgacttcctgatgaactacgacaagctcgagttcgtcgaaacggtcgaagagctggcagcaatgcacaatcttgaagtgccatttgaagcaggcagcggccccagccagatcgagcgccatcagaggcaaacgctttatcagttgatggacggtctgaatacgttttaccaacaatctttacaacaacctgttgccacgtctgcgcgccagtatctggaaaaacgcggattaagccacgaggttatcgctcgctttgcgattggttttgcgccccccggctgggacaacgtcctgaagcggtttggcggcaatccagaaaatcgccagtcattgattgatgcggggatgttggtcactaacgatcagggacgcagttacgatcgtttccgcgagcgggtgatgttccccattcgcgataaacgcggtcgggtgattggttttggcgggcgcgtgctgggcaacgatacccccaaatacctgaactcgccggaaacagacattttccataaaggccgccagctttacggtctttatgaagcgcagcaggataacgctgaacccaatcgtctgcttgtggtcgaaggctatatggacgtggtggcgctggcgcaatacggcattaattacgccgttgcgtcgttaggtacgtcaaccaccgccgatcacatacaactgttgttccgcgcgaccaacaatgtcatttgctgttatgacggcgaccgtgcaggccgcgatgccgcctggcgagcgctggaaacggcgctgccttacatgacagacggccgtcagctacgctttatgtttttgcctgatggcgaagaccctgacacgctagtacgaaaagaaggtaaagaagcgtttgaagcgcggatggagcaggcgatgccactctccgcatttctgtttaacagtctgatgccgcaagttgatctgagtacccctgacgggcgcgcacgtttgagtacgctggcactaccattgatatcgcaagtgccgggcgaaacgctgcgaatatatcttcgtcaggaattaggcaacaaattaggcatacttgatgacagccagcttgaacgattaatgccaaaagcggcagagagcggcgtttctcgccctgttccgcagctaaaacgcacgaccatgcgtatacttatagggttgctggtgcaaaatccagaattagcgacgttggtcccgccgcttgagaatctggatgaaaataagctccctggacttggcttattcagagaactggtcaacacttgtctctcccagccaggtctgaccaccgggcaacttttagagcactatcgtggtacaaataatgctgccacccttgaaaaactgtcgatgtgggacgatatagcagataagaatattgctgagcaaaccttcaccgactcactcaaccatatgtttgattcgctgcttgaactgcgccaggaagagttaatcgctcgtgagcgcacgcatggtttaagcaacgaagaacgcctggagctctggacattaaaccaggagctggcgaaaaagtgatttaacggcttaagtgccgaagagcgatcgggaagcccccgacagccgcactgagaggcagcggcaaatatataagtacgccctcgtaattatcgttggcggtaaacaaccgttggatttcagcgttaacggctgaaggacatcgggtcaatcgcccaacaccaacctcatgaaataagtgtggataccgtcttatggagcaaaacccgcagtcacagctgaaacttcttgtcacccgtggtaaggagcaaggctatctgacctatgccgaggtcaatgaccatctgccggaagatatcgtcgattcagatcagatcgaagacatcatccaaatgatcaacgacatgggcattcaggtgatggaagaagcaccggatgccgatgatctgatgctggctgaaaacaccgcggacgaagatgctgccgaagccgccgcgcaggtgctttccagcgtggaatctgaaatcgggcgcacgactgacccggtacgcatgtacatgcgtgaaatgggcaccgttgaactgttgacccgcgaaggcgaaattgacatcgctaagcgtattgaagacgggatcaaccaggttcaatgctccgttgctgaatatccggaagcgatcacctatctgctggaacagtacgatcgtgttgaagcagaagaagcgcgtctgtccgatctgatcaccggctttgttgacccgaacgcagaagaagatctggcacctaccgccactcacgtcggttctgagctttcccaggaagatctggacgatgacgaagatgaagacgaagaagatggcgatgacgacagcgccgatgatgacaacagcatcgacccggaactggctcgcgaaaaatttgcggaactacgcgctcagtacgttgtaacgcgtgacaccatcaaagcgaaaggtcgcagtcacgctaccgctcaggaagagatcctgaaactgtctgaagtattcaaacagttccgcctggtgccgaagcagtttgactacctggtcaacagcatgcgcgtcatgatggaccgcgttcgtacgcaagaacgtctgatcatgaagctctgcgttgagcagtgcaaaatgccgaagaaaaacttcattaccctgtttaccggcaacgaaaccagcgatacctggttcaacgcggcaattgcgatgaacaagccgtggtcggaaaaactgcacgatgtctctgaagaagtgcatcgcgccctgcaaaaactgcagcagattgaagaagaaaccggcctgaccatcgagcaggttaaagatatcaaccgtcgtatgtccatcggtgaagcgaaagcccgccgtgcgaagaaagagatggttgaagcgaacttacgtctggttatttctatcgctaagaaatacaccaaccgtggcttgcagttccttgacctgattcaggaaggcaacatcggtctgatgaaagcggttgataaattcgaataccgccgtggttacaagttctccacctacgcaacctggtggatccgtcaggcgatcacccgctctatcgcggatcaggcgcgcaccatccgtattccggtgcatatgattgagaccatcaacaagctcaaccgtatttctcgccagatgctgcaagagatgggccgtgaaccgacgccggaagaactggctgaacgtatgctgatgccggaagacaagatccgcaaagtgctgaagatcgccaaagagccaatctccatggaaacgccgatcggtgatgatgaagattcgcatctgggggatttcatcgaggataccaccctcgagctgccgctggattctgcgaccaccgaaagcctgcgtgcggcaacgcacgacgtgctggctggcctgaccgcgcgtgaagcaaaagttctgcgtatgcgtttcggtatcgatatgaacaccgactacacgctggaagaagtgggtaaacagttcgacgttacccgcgaacgtatccgtcagatcgaagcgaaggcgctgcgcaaactgcgtcacccgagccgttctgaagtgctgcgtagcttcctggacgattaatcggtaggccggatcaggcgttacgccgcacccggcactaggccctctgcacaaacgccaccttttcggtggcgttttttatcgcccacgcactaccagcgcctggtccagctcgcgatacgcttcaaccagtttctccagtgaaacgcgacttaaaccgctgggatttggcagcacccaaatctgcgtcgaaccaatggtgagcgtttgtttcccccactgtgcaccgcgctggctgaatccctgttcatatgcttgtttgcccagaatcgccaacgcctgcggctgataatcttcaattttttcaatcagcttacgcccgcctgcgtgtagctcctgctttgaaacttcattggcttgcaccgttggacggtctaccagtttggtgacgccacaacgataatccagcagatgctgtgcctcctgcggcttcaactgacggtcggtaaacccggcctgatatatcaccttccagaagcgatttgccggatgagcaaagggaaaaccagtcccggcggatgaaagcccagggttgataccgcaaaacacgacccgtaaccctggagccaaaatatcctcaaccatatttactcctttctaacatcaccaggaaaagtataacggattgaaaatacattgtttataaaaacagcaggcgcgcggtaatggctggattgcgacacggagttactttataatccgctaccatggccccttagctcagtggttagagcaggcgactcataatcgcttggtcgctggttcaagtccagcaggggccaccagatatagcaaaggctgacgagaaatcgtcagcctttttctttttatatatcagttactttgcgtgccagtaagccgctgcacgtacccgctgtgggtcatactgttccgcttcaaagcggcggcttaaattcttaacgactttaccttcgccggttatccagatgaagtaatcatcggcagggatttgcatctgcgccagacgcgcatctaccgcctgctcatcatgtgccagccattcgatattaaaaccatcaaggtgcgcgagataatcctgacaggcgttatcccgcacgctaaccagcgcactaacttgcggtttaacggcaagtttgctcaacgtttccaggcggcggcgcaatgcaggcattccggattcatcgcagacatacagctgatacgcgtaatcttccggcaccaccagcgaaccgcgcggacctgccaccgtaagtttatcgcccggttgcgcctgcatcgcccagccgctggcgaccccaccgtcgtgaataaagaaatcaatcgccagttcatggcgtagttcgtcatacagcggcgtatagtcacgcgacggtgggcgtggtccttccggccagacgatgccctcttccgttaccgttggcggcacaaagtgagcgtcaggttgaggaaagaagagtttgctgtgatcgtcaaagccacgcgatgtaaaaccgtccagcgcctcgccgccgaggacaatgcgctgaaaaccggcgctgatgcgctcaacgcgtaacacagtcagttcacggaagcgcagatcattgcgaacgcgctgcgggtagcggggggtgttattcattgttatcgccttcgtgatggtaatcagatatatctaaataaaactcgcaaatgataatgattgttaatcatgataaatgcaagcgatttgtagaactgatatgtctatagtctgataagacgaaccgcctcttctcaggcatcattactcaacgccggatgcggcgtgaacgccttatccggcctacgtgtgagatgagtccacgtttaaaaatcatttttacacttgcaagaacgctcatatcagatataaattagatatatctaattaagcaaaaggaggctgatatgagccatcatcacgaagggtgttgtaaacatgaaggccagccacgccatgagggctgctgcaaaggtgagaagtcagaacacgagcactgcggacacggtcaccagcatgaacacggtcaatgctgcggtggtcgccacggtcgcggcggcggtcgtcggcaacgtttctttggtcacggtgaattacgtctggtgattctggatattctctcgcgcgatgacagccacggttacgaattgattaaagcgattgagaatctaacccaggggaattacaccccaagcccgggcgtcatctacccaacgctggattttctgcaggagcagtcgctgattaccatccgcgaagaggaaggaggtaagaagcagattgcgctgaccgaacaaggcgcgcagtggctggaagaaaaccgcgaacaggtggagatgattgaagaacgcatcaaagcgcgttgcgttggcgcggcgctgcgccagaacccgcaaatgaagcgggcgctggataattttaaagcggtgctggatttacgcgtcaaccagagcgatatcagtgatgcacaaataaaaaagatcattgcggtgatcgaccgcgccgcttttgatattacgcaactggattaatcgccgcatccgccagtggcgcggtgcaattgccggatgcgacgcttgacgcgccttatccggcctacacccgctacacaccccgcaggcctgataagatgcgccagcatcgcatcaggcattgtgctccaaccgccggatccggcataccgattaatgcagtaccgtcaccgcgtcttccagtcggctggcgcggtgtttcaccatcgccgacacctgcgcactctcttccaccagctcggcatttttctgggtgatcaggttaagctcatccactgcacgggtcaggctggaaagcccatcggcctgttccagcgttgaatggctaatctgggcgatcaactgggtgacgtttttcacctgtgccacaatatcttccatcgtccgtccggcggcgtgtacctgctgcgaaccggattgcaccttatcagcactggcatcaatcagcttgcgaatatcgttggcagcattagcgctgcggctggctaaatgacgcacttcccctgccaccactgcaaaacctttgccctgttcgccggcacgcgccgcttccaccgccgcattcagggccagaatattggtctgaaacgcaatatcgttaatcagcgaagtaatggtgccaatgcgctgggtactgtcggcgatatcgtccattgtcttgatcaccgtggtcatcgcctccccaccctgcactgccgcattactggcagtgattgacagtttatcggcagccgacgccgtggcagagttctgtttcaccgacgccgccatttggttcatggtcgccaccgtttgctgaacgttatcaactgtctgctgggtatgttcgttcagttcatcggtgcctttcgccagcgtctcactgccatttctgacactggacacctggcttgagacatcgttaattagccaacggcacatcaggccaagttgccctaccgcacgtaatgtcagccccagctcatcgctgcgattcagatgctcaacactattacgttctccggtcgccaccttcagtgcctgatgggcaacattttctatcgggcgcacaatctgccattcaaaacaggcgcttgccaacaataccactaacgcacagaggatatacgtcaccaccggggcagcaacaaaccaaagcatggccgccagcaagataaacatcagggtcatcactccacgcgcccgccagcgaagcggtaatgaaggcagtttacccagccagcctttacgcaccaccaggcctttatgaatacgcttactggtacgtccggcgttcaacgctttgtacagcggctccaccgccgcgatctcttcatccgtcgcccgggtacgaatcgacatatagccactgatttttccctcgcgcaccatcggtaccgcattggcccgcacccaataatggtcaccatttttgcggcgatttttcacgatgccgctccagggctccccttttttcagggtgaaccacatatccgcaaacgccgcttttggcatatccgggtgacgcaccatgttgtgcggctgcccttgtaactcttgcaaggtatagccgctcacctgcacaaaagtgtcattagcatgagtgatatagctttgcagatcggtagtggacatcagagtggtatcgtccgccagcggggtattttgctgggtgacatacggatgagaagacatgttcgcgtcctgtgcaggttatatggttgttaacttcttgtcagagtttatgtcggccccgctgcggttatctttaaccgattaatttgatttagatcgcaatttgcgatttaaacacaaatctaattccttgatttaaaatactttcactctgttactatacgaaaacgttaattatcttgcccaaaaatcaggcaattattgccctgaaaacgtgcatttgcgcagcaatcatcaaatccatacccgacaaaaaccgtgcaaaataacaacaaatgttaacagatagcattaaatattgcacaaatgataaccgaatttgtgtttatcccgattttcgcgatcgcagccggagtggcgcaatccctgcaatacttaaatcggtatcatgtgatacgcgagcctccggagcatattttgaacaggttaccttcgagcgcatcggctttagcgtgcagcgcccacgccctgaatctcattgagaagcgaacgctggatcatgaggagatgaaagcacttaaccgagaggtgattgaatacttcaaagagcatgtcaatccggggtttttagagtatcgcaaatctgttaccgccggcggggattacggagccgtagagtggcaagcgggaagtttaaatacgcttgtcgacacccagggccaggagtttatcgactgcctgggaggttttggaattttcaacgtggggcaccgtaatccagttgtggtttccgccgtacagaatcaacttgcgaaacaaccgctgcacagccaggagctgctcgatccgttacgggcgatgttggcgaaaacccttgctgcgctaacgcccggtaaactgaaatacagcttcttctgtaatagcggcaccgagtccgttgaagcagcgctgaagctggcgaaagcttaccagtcaccgcgcggcaagtttacttttattgccaccagcggcgcgttccacggtaaatcacttggcgcgctgtcggccacggcgaaatcgaccttccgcaaaccgtttatgccgttactgccgggcttccgtcatgtgccgtttggcaatatcgaagccatgcgcacggctcttaacgagtgcaaaaaaaccggtgatgatgtggctgcggtgatcctcgaaccgattcagggtgaaggtggcgtaattctgccgccgccgggctatctcaccgccgtacgtaagctatgcgatgagttcggcgcactgatgatcctcgatgaagtacaaacgggcatggggcgcacgggcaagatgttcgcctgcgagcatgagaacgtacagccggatatcctctgccttgccaaagcgctcggcggcggcgtgatgccgattggcgcgaccatcgccactgaagaggtgttttcagttctgttcgacaacccattcctgcataccaccacctttggcggcaacccgctggcctgtgcggcggcgctggcgaccatcaatgtgttgctggagcagaacttaccggctcaggctgagcaaaaaggcgatatgttgctggacggtttccgtcaactggcgcgggaatatcccgatctggtacaggaagcgcgtggtaaagggatgttgatggcgattgagtttgttgataacgaaatcggctataactttgccagcgagatgttccgccagcgcgtactggtggccggaacgctcaataacgccaaaacgatccgcattgaaccgccactgacactgaccattgaacagtgtgaactggtgatcaaagcggcgcgtaaggcgctggcggccatgcgagtaagtgtcgaagaagcgtaatatcaaatcggatggcgatacgacgtcgccatccgatctttttatacgacgcgtacgcccgcaggcatcatccgctccggcgttaacagcacgctttcactgccgtcatcggtttccgcacacaacagcatgcattccgacgtttcaccacgcattttcgctttttgcagattgcataagaccaccaccgttttccccatcagctcttcttcgctgtagtacggcaccaggctggtcacggtttgcagcgttttttgccccacatcaacctgtacgatgtacagcttgtcggcgttttcatggcgtttcacttccacaatctttccgacgcgcatttccagacgtgcaaaatcagcgtaagccacggtttccattgcttcctcccttagggtaaaattttactaaactatagcaaaagtttttctcaatcctgtaggctaaaaatggagaatgcaggcgtgatcacattcgtgagccgctgtgttaccgttacagcgtcaaagaaacgcgctttatttactgaaaacaggtgacccgataagcacttcctctacaatgggggcgcacatcagggaaagtaaaaaaggtaaacatggcaacactaaaagacatcgcaatcgaagctggcgtatccctggcgacagtatccagggtcttaaatgacgatccgacattgaatgtgaaagaagagacgaaacatcgcattctcgagatcgccgaaaagctggagtacaagaccagtagtgcccgtaaactccagacaggtgcagtcaaccaacaccatattctggctatctacagctaccagcaggagctggagatcaacgatccttactatctggcgatccgccacggcattgaaacccagtgcgaaaagctgggcatcgagctcaccaactgttatgaacacagcggcttaccagacattaaaaacgtcaccggtattttaattgtcggcaaacccacgcccgccctgcgcgccgctgccagcgcgttgaccgacaatatctgttttatcgactttcacgaacccggcagcggttacgatgcggtggatatcgatctggcacgcatcagtaaagaaatcatcgacttctatatcaaccagggcgttaatcgtattggttttattggcggtgaagatgagcctggcaaggcggatattcgtgaggtcgcctttgcggaatatggccgactgaaacaagtggtacgcgaagaggatatctggcgcggcggtttttccagttcgtcgggttatgaactggcaaaacaaatgctggcgcgggaagactatccgaaggcactgtttgttgcttccgattccattgctatcggcgtactgcgggcaattcatgaacgaggcctgaacatcccacaggatatttcgcttatcagcgttaacgatatccccaccgcgcgatttacctttccgccgctctccaccgtgcgcatccattccgagatgatgggaagtcagggcgttaacctggtgtatgaaaaagcccgcgatggtcgcgcgctgccgctgttagtcttcgttcccagcaaattaaaactgcgcggcacgacccgttaaatccccttacacactgtccggcaatcgtttttgccggacagtgctgccgtttattttcgtgatccagttaaagtaaatgcatttacctgctactttttagtaaaaattttactaaactccccagcaattacacaaactaccatcaccatgaatggttccgatttctctctaccgggaggccctatgaatcgctgggaaaacattcagctcacccacgaaaaccgacttgcgccgcgtgcgtactttttttcatatgattctgttgcgcaagcgcgtacctttgcccgcgaaaccagcagcctgtttctgcccttaagcggtcagtggaatttccacttttttgaccatccgctgcaagtaccagaagccttcacctctgagttaatggctgactgggggcatattaccgtccccgccatgtggcaaatggaaggtcacggcaaactgcaatataccgacgaaggttttccgttccccatcgatgtgccgtttgtccccagcgataacccaaccggtgcctatcaacgtattttcaccctcagcgacggctggcagggtaaacagacgctgattaaatttgacggcgtcgaaacctattttgaagtctatgttaacggtcagtatgtgggtttcagcaagggcagtcgcctgaccgcagagtttgacatcagcgcgatggttaaaaccggcgacaacctgttgtgtgtgcgcgtgatgcagtgggcggactctacctacgtggaagaccaggatatgtggtggtcagcggggatcttccgcgatgtttatctggtcggaaaacacctaacgcatattaacgatttcactgtgcgtaccgactttgacgaagcctattgcgatgccacgctttcctgcgaagtggtgctggaaaatctcgccgcctcccctgtcgtcacgacgctggaatataccctgtttgatggcgaacgcgtggtgcacagcagcgccattgatcatttggcaattgaaaaactgaccagcgccagctttgcttttactgtcgaacagccgcagcaatggtcagcagaatccccttatctttaccatctggtcatgacgctgaaagacgccaacggcaacgttctggaagtggtgccacaacgcgttggcttccgtgatatcaaagtgcgcgacggtctgttctggatcaataaccgttatgtgatgctgcacggcgtcaaccgtcacgacaacgatcatcgcaaaggccgcgccgttggaatggatcgcgtcgagaaagatctccagttgatgaagcagcacaatatcaactccgtgcgtaccgctcactacccgaacgatccgcgtttttacgaactgtgtgatatctacggcctgtttgtgatggcggaaaccgacgtcgaatcgcacggctttgctaatgtcggcgatattagccgtattaccgacgatccgcagtgggaaaaagtctacgtcgagcgcattgttcgccatatccacgcgcagaaaaaccatccgtcgatcatcatctggtcgctgggcaatgaatccggctatggctgtaacatccgcgcgatgtaccatgcggcgaaagcgctggatgacacgcgactggtgcattacgaagaagatcgcgatgctgaagtggtcgatattatttccaccatgtacacccgcgtgccgctgatgaatgagtttggtgaatacccgcatccgaagccgcgcatcatctgtgaatatgctcatgcgatggggaacggaccgggcgggctgacggagtaccagaacgtcttctataagcacgattgcattcagggtcattatgtctgggagtggtgcgaccacgggatccaggcacaggacgaccacggcaatgtctggtataaattcggcggcgactacggcgactatcccaacaactataacttctgtcttgatggtttgatctattccgatcagacgccgggaccgggcctgaaagagtacaaacaggttatcgcgccggtaaaaatccacgcgcgggatctgactcgcggcgagttgaaagtcgaaaataaactgtggtttaccacgcttgatgactacaccctgcacgcagaggtgcgcgccgaaggtgaaacgctcgcgacgcagcagattaaactgcgcgacgttgcgccgaacagcgaagcccccttgcagatcacgctgccgcagctggacgcccgcgaagcgttcctcaacattacggtgaccaaagattcccgcacccgctacagcgaagccggacaccctatcgccacttatcagttcccgctgaaggaaaacaccgcgcagccagtgcctttcgcaccaaataatgcgcgtccgctgacgctggaagacgatcgtttgagctgcaccgttcgcggctacaacttcgcgatcaccttctcaaaaatgagtggcaaaccgacatcctggcaggtgaatggcgaatcgctgctgactcgcgagccaaagatcaacttcttcaagccgatgatcgacaaccacaagcaggagtacgaagggctgtggcaaccgaatcatttgcagatcatgcaggaacatctgcgcgactttgccgtagaacagagcgatggtgaagtgctgatcatcagccgcacagttattgccccgccggtgtttgacttcgggatgcgctgcacctacatctggcgcatcgctgccgatggccaggttaacgtggcgctttccggcgagcgttacggcgactatccgcacatcattccgtgcatcggtttcaccatgggaattaacggcgaatacgatcaggtggcgtattacggtcgtggaccgggcgaaaactacgccgacagccagcaggctaacatcatcgatatctggcgcagcaccgtcgatgccatgttcgagaactatcccttcccgcagaacaacggtaaccgtcagcatgtccgctggacggcactgactaaccgccacggtaacggtctgctggtggttccgcagcgcccaattaacttcagcgcctggcactatacccaggaaaacatccacgctgcccagcactgtaacgagctgcagcgcagtgatgacatcaccctgaacctcgatcaccagctgcttggcctcggctccaactcctggggcagcgaggtgctggactcctggcgcgtctggttccgtgacttcagctacggctttacgttgctgccggtttctggcggagaagctaccgcgcaaagcctggcgtcgtatgagttcggcgcagggttcttttccacgaatttgcacagcgagaataagcaatgaggatcatcgataacttagaacagttccgccagatttacgcctctggcaagaagtggcaacgctgcgttgaagcgattgaaaatatcgacaacattcagcctggcgtcgcccactccatcggtgactcattgacttaccgcgtggagacagactccgcgaccgatgcgctatttaccgggcatcgacgctattttgaagtgcattactacctgcaagggcagcaaaaaattgaatatgcgccgaaagagacattacaggtagtggaatattatcgtgatgaaactgaccgtgaatatttaaaaggctgcggagaaaccgttgaggtccacgaagggcaaatcgttatttgcgatatccatgaagcgtatcggtttatctgcaataacgcggtcaaaaaagtggttctcaaagtcaccatcgaagatggttatttccataacaaataacaactacggcggcaaaaggagtttgccgccaccgctaccctactcattttcggagatgtgttatgtctgataccaaacgtaatacaatcggcaaattcggcttgctctcgctgacttttgccgccgtttacagctttaacaacgttatcaataataatattgagcttggactggcctcggcaccgatgtttttcctcgcgacgattttttattttattcccttctgtctgatcatcgcagaatttgtttcgttaaataaaaactcagaagccggtgtctacgcgtgggtaaaaagttcgctgggcggacgttgggcatttattactgcctatacctactggttcgtaaacctgttctttttcacctcactgttgccgcgcgttattgcttatgcttcgtatgccttcctcggatacgaatatattatgacgccggttgccaccaccattatcagtatggtgctgttcgccttctccacctgggtttccaccaacggggcgaaaatgttggggccaattacctccgtcacttcaacgctgatgctgctgttaacgctctcctacattttactggcaggtacggcgctggttggcggcgtacagcctgctgacgccatcaccgttgacgcgatgatcccgaacttcaactgggcgttcctcggcgttaccacctggatctttatggccgcaggtggcgcggagtccgtcgctgtgtacgttaacgacgtcaaaggcggttcgaaatcgttcgttaaagtgatcatcctcgccgggatttttatcggcgtactgtattccgtctcctcggtgctgattaacgtcttcgtcagcagcaaagagttgaaatttaccggcggatcggtgcaggtattccacggcatggcggcgtattttggtctaccggaagcgttgatgaatcgctttgtcggtctggtgtcctttaccgcgatgttcggttccctgctgatgtggaccgcaacgccggtgaaaattttcttctccgaaatcccggaaggcatctttggtaagaaaaccgtcgaactgaacgaaaacggcgttccggcgcgcgcagcgtggatccagttcctgatcgtcatcccgctgatgattatcccgatgctcggttccaataccgtgcaggatctgatgaatactattattaatatgaccgccgcagcgtccatgcttccgccgttattcatcatgctggcttacctgaatttacgcgccaaattagatcacctgccacgcgatttccgtatgggctcccgccgcaccggtattatcgttgtttcaatgctgattgcgatatttgccgtagggtttgtcgcttcgacattcccgactggcgcgaatattctgaccatcattttttataacgtcggcggtattgttatcttccttggctttgcgtggtggaaatacagtaaatatataaagggattaacggctgaagagcgccatattgaagcgacgccagccagcaatgttgattaagcagaataataaaaaatgagcaggcattttccctcttcctggatgaggagagggaaaatagtttctgcctttatatttttataattacaacgataaaaggctgtactttttctttagctcatggattaacacaatgaaattaatcactgcaccatgcagagcattacttgctctgccgttttgctacgccttttctgcggcaggagaagaagcacgtccggcagaacatgacgacacaaaaacacccgcaattacctcgacatcttctccttcatttcgtttttacggcgaattaggggttggtggatatatggatttagagggtgagaataaacataaatacagcgacggtacctatattgaaggtggcctggagatgaagtacggctcctggttcggcctgatttacggcgaaggctggaccgtgcaggccgaccacgacggcaatgcctgggtgccagaccatagctggggtggtttcgagggcggaattaaccgtttctatggcggttatcgtaccaatgatggcaccgaaatcatgctcagtctgcgtcaggattcctcgctggatgacctgcaatggtggggcgatttcacccccgatctgggctacgtcattcccaatacccgcgacattatgactgcgctgaaggtacagaacttaagcggcaactttcgttatagcgtcaccgcgactcctgccggacatcatgatgaaagcaaagcctggctacattttggcaaatacgatcgctatgacgacaaatacacctatccggcaatgatgaacggttacatccagtatgaccttgccgaaggcatcacctggatgaacggtctggaaatcaccgacggcacaggacagctctatctcacgggcctgctaactcctaactttgccgctcgcgcctggcaccataccggacgcgccgacgggctggacgtaccgggaagtgaaagtgggatgatggtgagcgccatgtatgaagcgttaaagggcgtttatctctccaccgcttacacctacgccaaacatcgccctgaccacgctgacgatgaaaccacctctttcatgcagtttggtatctggtacgaatacggcggcggacgtttcgccacggcttttgatagccgcttctacatgaaaaatgcctctcacgatcccagcgaccaaatcttcctgatgcaatatttctactggtaataaggactgtaatttcatgaaaataaaaactattttaacgccagtaacctgcgctctgctgataagtttttccgcccatgccgctaacgccgacaattataaaaacgtgattaaccgtactggcgcgccgcagtacatgaaggattacgattacgacgatcaccagcgttttaatccgtttttcgatctcggagcctggcatggtcatctgttgccagacggccctaacaccatgggcggctttccgggcgttgcgctgctgacggaagagtacatcaactttatggccagcaatttcgaccgcctgaccgtctggcaggacggcaagaaagtcgactttacgctggaggcatacagtattcccggtgcgctggtgcaaaaactgacagcaaaagatgtgcaagtcgaaatgactctgcgcttcgccacgccgcgcacgtcactactggaaaccaaaatcaccagcaataaaccgctggatctggtgtgggacggcgaactgctggaaaaactggaagcgaaagaagggaaaccgctttccgataaaaccattgctggcgaataccctgactatcagcgcaaaatcagcgccacccgtgatggcctgaaagtcacctttggcaaagtgcgcgccacctgggatctgctgacctccggcgaatcggaatatcaggtgcataaatccctgccggtgcagactgaaatcaacggtaatcgctttaccagtaaggcgcatatcaacggttcgaccacgctctacaccacctattcccatctgctgaccgctcaggaagttagcaaagagcaaatgcagatccgcgatattctggcgcgtccggcgttttatctcaccgcctcgcagcaacgctgggaagaatacctgaagaaagggttaaccaatccggatgcgacgccggaacagacgcgcgtcgcggtgaaagcgatcgaaacgctcaacggtaactggcgctcaccgggcggtgcggtgaaatttaacaccgttacaccgtcggtgaccgggcgctggttctccggcaatcagacctggccgtgggatacctggaagcaggcgtttgcgatggcgcatttcaatccggacatcgccaaagagaatatccgcgcggtcttctcctggcagatccagcctggcgatagcgtgcgtccgcaggatgtgggctttgtccccgacctgatagcgtggaaccttagccccgagcgtggtggcgatggcggcaactggaacgaacgtaataccaaacccagccttgccgcctggtcggtgatggaagtgtataacgtcacccaagataaaacctgggtggcagagatgtacccgaaactggtggcctatcacgactggtggttacgtaaccgcgatcacaacggcaacggcgtgccggaatatggcgcgacccgcgacaaagcccacaacactgagagcggcgagatgctgtttacggtgaaaaaaggcgataaagaagagacgcagtctgggctgaacaactacgcccgcgtggtggagaaaggccagtacgacagtctggaaattccggcacaggttgctgcatcgtgggaatcggggcgtgatgatgccgccgtctttgggtttatcgacaaagaacagttggataaatatgtcgctaatggcggcaaacgtagcgactggacggtgaaattcgccgaaaaccgcagtcaggacggaacgttgctgggctactcgctattgcaggagtcggtggatcaggccagctatatgtacagcgataaccattatctggcggagatggcaaccatcctcggtaagccagaagaggccaaacgctatcgccagttggcacagcagctcgcggactacatcaacacctgtatgttcgacccgactacccagttctactatgacgtacgtattgaagataaaccactggcgaacggctgcgcgggcaaaccgattgttgagcgcggtaaagggccggaaggctggtcgccgctgtttaacggtgcggcaacgcaggccaatgccgacgcggtggtgaaggtgatgctcgatcctaaagagttcaacacctttgtcccgctgggaacggcggcgttaaccaatccggcttttggcgctgatatctactggcgtgggcgcgtatgggtggatcagttctggtttggtctgaaagggatggagcgttacggttatcgtgatgatgccctgaagctggcggatacgttcttccggcacgccaaagggttaaccgccgatggaccaattcaggaaaattacaacccgctgacaggcgcacagcaaggcgcaccaaatttctcctggagtgccgcgcatttgtatatgttgtataacgattttttccgtaagcaataatttgcaactgctggcggatgcggcgtaaacgccttatccgccctacatgtgcaatcctcctggccggataaaacgcggcaagcgttgcatccggcaactgcaccgcgccactggcggatgcggcgtgaacgccttatccgccctacatgtgtgttcccgtaggtcggataagacgcgacaagcgtcgcatccggcatctgcaccgcgccactggcggatgcggcgtggacgccttatccgccctacatgtgcaattccgtaacctggataaaacgcgacaagcgtcgcatccggcgttatcaccgggcgtattctttttgaatcccatcacaaaccccgcactccccttttcccttttctccggcgacggctaaattagaactcatccgaccacataacaattattttacatactggacaattttatgagctacccgtcgctgttcgccccgctggatttaggttttaccacgttaaaaaaccgcgtgttgatgggctcaatgcacaccgggctggaggaatacccggacggtgccgagcggctggcagcgttttatgccgaacgcgcccgtcacggcgtggcgctgattgtcagcggcggcattgcaccagatttaacaggcgttggcatggaaggtggcgcaatgctcaacgacgccagccagatcccacaccatcgcaccattaccgaagcggtacatcaggaaggcggcaaaatagccctgcaaattttgcataccgggcgctacagctaccaaccgcatctggtcgccccgtccgcattgcaggcccccatcaaccgtttcgtgccccatgagttaagccatgaagagatcctgcaactgatcgacaatttcgcccgctgcgcgcaactggcgcgggaggcaggatacgacggtgtagaggtgatgggttccgaagggtatttgatcaacgaatttctgacgctgcgcaccaatcagcgtagtgaccagtggggcggcgattaccgcaaccggatgcgatttgccgtagaagtagtgcgtgcggtgcgcgaacgcgtcggcaacgacttcattattatctaccgactgtcgatgctcgacctggtcgaagacggcgggacttttgccgaaacggtagagctggcgcaggccattgaagcggcgggcgcgaccattatcaacaccggcattggctggcatgaagcacgtattccgaccattgccacgcccgtgccgcgcggcgcatttagctgggtcacgcgcaaactgaaaggccacgtctcgctgccgctggtaaccaccaaccggattaacgatccgcaggttgccgacgatattctctcgcgcggcgatgccgatatggtatcgatggcgcgaccgtttcttgctgatgcggagctgctgtcaaaagcgcaatcgggacgagccgatgagatcaacacttgtattggctgcaatcaggcctgtctcgatcaaatcttcgttggcaaagtcacctcgtgcctggtgaatcctcgcgcctgccacgaaaccaaaatgccaatccttcccgccgtgcagaaaaaaaatctggcggtggtcggtgcgggacctgctgggctggcgtttgccattaacgcggcggcgcgtgggcatcaggtaacattgtttgacgctcatagcgagattggcgggcagtttaatatcgccaaacagatccccggcaaagaggagttttacgaaacgctgcgctattaccgccggatgatcgaagtgacgggcgtgacgctaaaactcaatcacaccgtgacggcggatcagttacaggctttcgatgaaacgatcctcgccagtgggatcgtgccgcgcactccgcccatcgacgggatcgatcatccgaaggtattgagttatctcgatgtactgcgcgacaaagcgccggttggcaacaaagttgccatcatcggttgtggcgggattggttttgatacggcgatgtatttaagtcagccgggcgaatccaccagccagaatatcgccgggttctgtaatgaatgggggatcgacagtagcctacaacaggctggtggcttaagcccgcagggaatgcagatcccccgtagcccacggcagattgtgatgctccagcgcaaagccagcaaaccaggacaggggttaggcaaaaccaccggctggatccatcgcaccaccctgctctcgcggggtgtgaaaatgatcccaggcgtaagttatcagaagattgacgatgacgggctgcatgtggtgatcaacggcgaaacgcaggtattagcagtggacaatgtggtgatctgcgcagggcaagagccaaaccgcgcgctggcgcaaccgctgattgatagcgggaaaacggtgcatttaattggcggctgcgatgtggctatggagctggacgcacgacgggcaattgcccagggaacacggctggcgctggagatttaaatcgttatttgaagcgccggatgcaacgcatccggcacgtcgcgttaatcaataaacaaggcgggagaaatgccgaatcgcgttgccaattttttagcgtgttccagcgttaatttcctcttcccgctcaaaacgcgtgacaccatagatttactgccaatttccggcagatcggaaagggttaaaccatattgatccataagggtacgaatcacggctataccgccaggcatggcttgagccatggcattaaattccgcaaattcgggcgctgattcttcccacgcggttattttggcacacaccagatccagcaaggggttttcaggatcgttgagcagcagatgatctaccagttccagcgcctgggtgtattgttcctcgttctgaatacccgccagaaaaggtgccacagcagttagcttttctcctgcttgcaagatgtcggcaatcgcaatcattttttccccttagtacgatgaacagcggtaaagaaatcgtattctttatgcgtcataacttcacgtatgtagcacttttgcgattcaaaaaagaccattgctacaacacgtaattcattgcccccaacattgaaaacataatgcttatccagatatttgaagttatccagagatgggaatactgcttttaatgactcaggttttttgaaatatcccttagcaatcgtgttccccagagccaccaactccgttttatgttgcgggtatttttccgcagcatctttcaatgctttttgagttatcaggtgcattcttcatcacgtccgttgacaaattggcaatatgataacatccgttgccagattggcaacggatgaatttatctgtgtgacggaagaataaacgtagaaaaacgctaaacaagagaatgtagacgatggtgacagggattttttgttttatggaagcgcgattccagaactgggcagacattgccggatgcgacgcttgccgcgtcttatccggcctggagtaacgtgctgaacgtaggccggataaggcgtttacgccgcatccggcaggtaactcccaatcttaccgacgacgtcccagcttcaccgctttcagtaccacaaatttattattcgtcgcaatagtggtgcagttgccgaaaatcttcttcagtttatggaagtaatccaggtgacggttggcaacgatatacagctcgccgttgattttcaggcagcggcgggcgtggtggaacatctcccaggcgacgttatcggtcagcgcatgttgttggtgaaacggcgggttgcagagcacagcattaaagcggaaaggctccacgccggagagcgcgttgttgatcataaactcgcagcgatccaacgcctctggcatgttggtttcaacgttcaaacggctggaagcaaccgccatcggcgattcatcgacaaacaccactttcgcctgcgggtttttatcaagcagcgtcagaccaataacgccattaccgcaaccgagatcgacaatctccccttcgagattctctggcagatgttgcataaagaagcgcgcgccgatatcaagcccggtgcgggagaagacattcgcatggttgtggatagtccagtcagtaccttccagcttccagctaacggtctgcggcgcatcggccagctgcggttcattgaaagtgcaattaatcaggcgcgcttttttccatgccagcgtggtggtggttgggccgagcactttttcgaacagttccagcgtggaagtgtgaatgtcacgggccttggcaccggcaataatacgtgtatccgacgtgaccactttgcgcagcgcacgcagttgctgttccagcaatgccagtgttttcggcactttgatcagcaccacacccggctgttgcgggtagtcggcggtgctgtcgagaaacttcacgctcgactcatcaatcccgttgaggcgtaaattctcgcgcgtcgccagttcactgatgtatgagtcgccaatgctgtacggcttatgttccgccagtgcgcagcttaacgcaccaaaggcatcattcaggatcaacaccgggccgcggatttctgtgtcgtccaactgttgcagcaaatattcatccgccgcttcccacgcctgtagcgggttaacgtcatccgtcgccggaaaacgttgtagtgtcagtgaacggaaaccgttgtctaagtggctcatcggccctcctgaatgataaaatttcgacattgcccctgaaaagggtgcgtgagtataccctttttctctttttcgtgggcggttatgagcaatcttacttatcttcagggttatcccgagcagctactttcccaggtgcgaacactgattaacgaacagcgtctgggcgatgtgctggcaaaacgctatccgggaacacacgactacgccaccgataaagccctctggcaatatactcaggatctgaaaaatcagtttctgcgtaatgccccgccgatcaataaagtgatgtatgacaataagatccatgtgctaaaaaacgcgctcgggttacataccgctgtttctcgtgtgcagggcggcaagctgaaagcaaaggtggagatccgcgtcgctaccgtgtttcgcaacgcgccggaaccgtttttgcgcatgatcgtggtgcacgagctggcgcacctgaaggagaaagagcataacaaagcgttttaccagttgtgttgtcatatggaaccccagtaccaccagcttgagttcgacacccgactgtggctaacgcagttgtcgcttgggcagaacaaaatctgaaaatgatgtcaggcgttatcttttctttctttagcgcctaaaatcgacctcccccctttcgttaaggataacgaccatgctgcgcgcatttgcccgccttcttctccgtatttgtttttctcgccggactctaaagattgcctgcttactgttacttgtggcaggagcgaccatccttatcgccgatcgcgtaatggtcaacgccagcaaacagctgacctggagcgatgtcaacgccgttccggcgcgtaacgtgggtttattgctgggggcgaggccgggtaatcgctactttacccgacgtattgataccgcagcagcgttgtaccacgccggaaaagtgaaatggctgctggtaagtggcgataacggacgtaaaaattacgatgaagcatcaggtatgcagcaggctttgatcgctaaaggcgtaccagcaaaagtgatcttctgcgactatgccggattctcaacgctggattcggtagtgcgtgccaaaaaggtttttggtgaaaaccatatcaccattatctcgcaagaatttcataatcaacgcgccatctggctggcaaaacagtacggcatcgacgctatcggttttaacgcgccagacctcaatatgaagcacggtttttatactcaactgcgggagaaactcgctcgtgtcagcgccgtgattgacgccaaaatcctccatcgccagccgaaatatctcgggccttcggtcatgattgggccgtttagtgagcatggctgtccggcgcagaaataatgcgtatctgcgcacgtcgaagatgaaaaaggcgtgctacattgacgacagaatccctttatggagtatccacgcgttatgatacgtttcgctgtgattggtacgaactggatcactcgccagttcgtcgaggccgcccatgagagcggtaaatacaagttaaccgccgtatattcccgcagccttgaacaggcccagcacttcgccaatgatttttctgtcgagcatctgtttacctcgctggaagcgatggcggaaagcgatgccattgacgcggtgtatattgccagcccgaattccctgcatttttcccagacacaacttttccttagccataaaattaatgtgatttgcgagaaaccgctggcgtcgaatctggcggaagtggatgccgccattgcctgtgcgcgggaaaatcaggtggtgctgtttgaggcatttaaaaccgcctgcctgccgaactttcatttgttgcgccaggcgctgccgaaagtcggcaaactgcggaaagtctttttcaactattgccagtattcctcgcggtatcaacgttacctggatggtgagaatcccaacacctttaatccggcattctctaacggttcaattatggatatcggtttttactgtctggcgtcggcggtggcgttatttggtgagccgaaaagcgtgcaggcaaccgccagtttgctggcaagcggcgttgacgcccagggcgtggtggtgatggattacggtgatttcagcgtcaccttgcagcactcaaaagtcagtgattctgtcctggcgagcgagattcagggcgaagcaggatcgctggtgattgaaaaactgtctgaatgccagaaagtgtgcttcgtgccgcgtggcagccaaatgcaggatctcacccagccgcagcatattaataccatgctctacgaagcagagctgttcgctaccctggtggatgagcatctggtggatcatccagggctggcggtcagtcgcatcaccgccaaactgctgaccgagatccgccgccagactggggtgatttttccggcagatagcgtaaaactataattgccaaagtaaaacagtgtaaaaggtatgtaacagaccattgactggctgaatggtctgtcatactttgttacctgcaaaggggagtaacttcattgccggtcgatcgtcattacgatgtgtgaaaaaacacatccggtcaccgggcaacccgaaaggaatacgcagacgtattccttttttgttgtaagtgagaccttgccggaaggcgaggtctatgcataaaaagcagcggctgacgtcttccgacgttggccgtttttttatgtgtaaggaacttctatgaatactgtcggcacgccgttgctatggggcggattcgctgttgttgtcgccattatgctggctatcgacctgttgttgcaggggcgtcgtggggcacatgccatgaccatgaaacaggctgcggcctggtcgctggtctgggtgacgctgtcgttactgtttaacgccgctttctggtggtatctggtgcaaaccgaaggtcgcgccgttgccgatccacaggcactggcctttctcacaggttatctgattgagaaatcgctggcggtcgataacgtctttgtctggctgatgttgttcagctatttctctgttccggcggcattacaacgccgcgtgctggtgtatggcgtgctcggggcgattgttctgcgtaccatcatgatcttcactggcagctggctaatttcgcagttcgactggatcctgtatatcttcggtgccttcctgctgtttaccggcgtgaagatggcgctcgcccatgaagatgaatcaggcattggcgacaagccgctggtgcgctggctacgcggtcatttgcgcatgaccgacaccatcgacaacgagcatttctttgtgcgtaagaatggattgctgtacgccacaccgctgatgctggtactgattctggtggaattgagcgacgtgattttcgccgtggatagcattccggctatcttcgccgtgaccactgacccgttcattgtgctgacctcaaacctgtttgcgatcctcggcctgcgtgcgatgtatttcctgctggcgggcgtagcagagcgtttctcgatgctcaaatatggcctggcggtgattctggtgtttatcggtatcaagatgctgattgtcgacttctaccatattccaatcgccgtctcgctgggcgtggtgtttggcattctggtgatgacgtttattatcaacgcctgggtgaattatcggcatgataagcagcggggtggataatttttaatctgcctaagccgtgtaccctgtcattaacatgagcaccgttttctccctctcccttccagggagagggtcggggtgagggtaatttttcgcaccgatgctggcctgttcccctcaccctaaccctctccccaaacggggcgaggggactgaccgagtccttttttgatgttgtcatcagtctggaagccgcacgttggctttatttttatgtcaaagaaatgtaaccattaagtttcaaaatatgacctctctttaaaatccagcatttttcgcttcccgaagctgtaactttccttatactcgaccttgcaaacactttgttacatcctgaaagatgcgtcgacagaacgcaccagggatgtgcgacaacacaatgaaaggatcgaaaaatgactacgcaacgttcaccggggctattccggcgtctggctcatggcagcctggtaaaacaaatcctggtcggccttgttctggggattcttctggcatggatctcaaaacccgcggcggaagctgttggtctgttaggtactttgttcgtcggcgcactgaaagccgttgcccccatcctggtgttgatgctggtgatggcatctattgctaaccaccagcacgggcagaaaaccaatatccgccctattttgttcctctatctactgggcaccttctctgctgctctggccgcagtagtcttcagctttgccttcccttctaccctgcatttatccagtagcgcgggtgatatttcgccgccgtcaggcattgtcgaagtgatgcgcgggctggtaatgagcatggtttccaaccccatcgacgcgctgctgaaaggtaactacatcgggattctggtgtgggcgatcggcctcggcttcgcactgcgtcacggtaacgagaccaccaaaaacctggttaacgatatgtcgaatgccgttacctttatggtgaaactggtcattcgcttcgcaccgattggtatttttgggctggtttcttctaccctggcaaccaccggtttctccacactgtggggctacgcgcaactgctggtcgtgctggttggctgtatgttactggtggcgctggtggttaacccattgctggtgtggtggaaaattcgtcgtaacccgttcccgctggtgctgctgtgcctgcgcgaaagcggtgtgtatgccttcttcacccgcagctctgcagcgaacattccggtgaatatggcgctgtgtgaaaagctgaatctggatcgcgatacctattccgtttctattccgctgggagccaccatcaatatggcgggcgcagcaatcactattaccgtgttgacgctggctgcggttaatacgctgggtattccggtcgatctgcccacggcgctgctgttgagcgtggtggcttctctgtgtgcctgtggcgcatccggcgtggcgggggggtctctgctgctgatcccactggcctgtaatatgttcggtatttcgaacgatatcgccatgcaggtggttgccgtcggctttatcatcggcgtattgcaggactcttgcgaaaccgcgctgaactcttcaactgacgtgctgttcactgcggcagcttgccaggcagaagacgatcgtctggcaaatagcgccctgcgtaattaattgtttaacccctttcgtctacggcggaaggggttttctcaactttaaacggatcaattccccttttctgcatccgccagaaacgaatgatattcaggccattcataagcagaaaactaccctcaatcatcgtgccgcctatcgaccccgcccagaagttgtgaatcacccagcaacacgttgaaaaccacattacgcagcgcatggtcagccctttacagcagaatagcgcccaggtactgacaatcgtgccgataaccggcaatagttcgacaggatgatggaacttcgcgaggccaattccgccagtcagcacaataaaaatcgccattacccataagctgcgcgtgcgtaaggtaatcaatgtacgaatggcattaaggatggcactggcaccagcgggataggtgcccagaagaaaaaaatgtacgccaataacggcgctatagaccgaaagctgctttttgaagcgacgttcgtcacgattgaaaaatgttgtgataccaatcagaaaggcgatgacacccacgccctgggccagccaatacgcggtcatgataaatccttagcaggtatggaaaagcaaacggcgcttcacattatgaaacgccgttttttattaacaactcatttcgactttatagcgttacgccgcttttgaagatcgccagttcgcggaagtcgttacgctcgttacaggtttgcttaccgttggcaaactcaacgatggtgtcgataaattcttccagcaactgcggcatcgctttaccgtggatcaactgacccgcgtcaaagtcgatccagtgttttttcttcgccgccagttcactgttggtggcgattttcaccgtcggcacaaatccaccatacggcgtgccacgaccagtactgaacagcaccatatggcagcccgcacccgccagggcgctggtcgctacggcatcgttacccggcgcacttaacaagttcagccctggcgttttcagacgctcgccgtaacgcagcacgtcaaccacgacgctggaacccgctttctgggtacagccaagtgatttgtcttccagcgtggtgataccgcccgctttgttccccggcgatgggttttcatagatcggctgatcatgggcaataaagtactgtttgaagtcgttgaccatggtgaccagtttttcaaacgttgcttcgtcgcggcaatggtccatcagcaactgctctgcgccaaacatctccggcacttcggtcagtacggtagtaccgccgttagcaatcacgtagtcagagaaacgccccagcatcgggttagcagtaataccagaaagaccgtcagaaccaccgcactccagaccaaacttcagttcgctgagtttgcctggctcgcgtttatcgttgcgcatcacgttatacagctgatgcaaatgctcgattccggcttcgatctcatcatcctgctgttggcagatcatgaaatgaacgcgttcaggatcgatatcgcccagcgtttcacggaatgcggcaacctggttgttttcacagcccagaccaatcaccagcactgcgcctgcgttcgggtggcgcaccatgttttgcagcatggtgcgggtattaatgtgatcgtcgcccagctgtgagcagccgtaggtgtggctgaagaggaacacgccgtcagtaccttcggcgttgttggtctctttcagaaaacggttctggatctgccgcgcgatgccgttgacacagcccacggttggcaggatccacagctcattacgcaccccgacatcgccgttagcgcgacgatagatctgcacttcacgatctgccgcttgcgcaggcagatcctgaaaatcaggttgatagcgatactgatccagatcgctcagattcgtgcgcgtattgtgggcgtgaacgtgaacacctgccgcaatatccgccaatgcataaccaatcggcaggccatatttgatgacattggccccttttgcgatatccgttaacgcaaatttatgtccacgagcaacatcctggcgcagcgtaacagtctggttatcgacactgacttctgtgccttcagccaaatctgctaaagcgaccgcgacgttatccagcgcatggatcttgatgtattgcatatcaaccccagaccttagttcagttcaatggcgaagtagtcacgcgcattgttaaagcaaatatttttcaccatctcgcccagcaggttgatgtccgccggtgcttcgcccgcttccacccagcgaccgatcatctggcacagaatgcggcggaagtattcgtgacgggtgtatgacaggaagctacggctgtcagtcagcataccgacaaagcggctcagcagaccgagctgcgccagttgggtcatctgacgttccataccgtctttctgatcgttaaaccaccagccggaaccgaactgcattttgcccggcataccttcgccctggaagttaccgatcatggtgcccagcacttcgttatcgcgcgggttcaggcagtacagaatggttttcggcagcaggttttcttcattctgcttgctcagcaacttagacagctcttccgccatcggacggtcgttgatggagtcaaagcctacatccggccccagcagtttgaactgacgcaggttgttattacgcagcgcgccaatgtggtactgctgtacccagccgcgacgtgcatattcggcaccaaggaacaccagtaccgcagttttgaactgcgccacttcgtgctcgctcagggtttcgccagccagacggcgcgccagaatgctgtccagttccgcttcgttcgcttcagcaaacatcaccacatccagcgcgtggtcagacactttacagccgtgagcggcgaagtgatccagacgtttggtcagggcagtttgcaggtcagcaaagcggcgaatgtcggtatcggaaacttcgcccagcttcgccatgtagtcgttaaaggtcgcctgttcgatgttgaaggctttgtccggacgccagctcggcagcactttgatggtgaaagagccgtctttggcgatctctgcgtgatgctccagagaatcgatcgggtcatcggtggtgccgaccattttcacgttcatctgctgcatgatgccgcgcgcggagaagttatcctgcgccagcagttcgttacattcgttccagatttcatcggcagttgacggagaaagcaatttgccagtgataccaaacggacggcgcagttcgaggtgcgtccagtggtataacgggttgccgatagtgtgcggaacagtcgccgcccaggcgtcaaatttttcacggtcagacgcatcaccggtacacagacgctcggccacaccgttggtacgcatagcgcgccatttgtagtgatcgcctttcagccagatgtcatacaggtttttaaaacgatagtcttccgcaatctgctgcggcggcaaatggcaatggtaatcgaaaatcggctggtcttttgcgtagtcgtgatacagacggcgggcaaattcggtatctaacaggaaatcttcagtcataaacggagtcattttcgtcttcctctcaacgagtgagctagcttgcttatggtgcgatgctgacaaagttatcacaccaatttccagagtccgaagatattttcgtgagttagatcaataaacgtagttaaaaaaattactctcaaagtggtaaatctcgctgcaggccgcgccagtactggccttgctgtcgtcaggtaatgtccctacaaatattcccacatttgtgatggctctcaccttttaaagttgtatgacaagttatctttctgccgtcgcaaatcataagtcgacggaatgcaaattgccgattcattcatttgttagatgaatcgggttaaccggtacggaagccgaattagcacgaaactttcatggcaacgttcggggcgtgccggttttttttcggttacccggtcgtaactaacatcttcagcctctggcgggatgatggccgcgcttcctgcggatataacaaaacgatgaggttttacatgcgtaaaattaaagggttacgttggtatatgatcgcactggtgacgctcggcaccgtgcttggttacctgacgcgtaacactgtggcggcagctgcgccaactctgatggaagagttaaacatctccacccaacagtattcctatatcatcgcagcctattctgctgcttatacggtcatgcaaccggtagcaggttatgtactggatgtgctgggtacgaaaatcggttatgcaatgtttgctgtgctgtgggccgtgttctgtggtgcaaccgcgctggcaggtagctggggtggcctggctgttgctcgtggtgcggtcggtgccgcggaagcagcgatgatcccggcgggtctgaaagccagctccgaatggttcccggcgaaagagcgttccatcgcagtaggctactttaacgtaggttcttcgattggtgcgatgattgcgccgccgctggtggtatgggcaatcgtaatgcacagctggcagatggcatttatcatctccggtgcattgagctttatctgggcgatggcatggctgattttctataaacatccgcgcgaccagaagcatctgaccgatgaagaacgcgactatattattaatggtcaggaagcccagcaccaggtgagcacggcgaagaaaatgtccgttggtcagatcctgcgtaaccgtcagttctggggtatcgcgctgccgcgtttcctggcagaaccggcctggggtacttttaacgcgtggatcccgctgttcatgtttaaagtttacggctttaacctgaaagagatcgcgatgttcgcctggatgccgatgctgtttgctgacctcggttgtatcctcggtggttacctgccgccgctgttccagcgttggtttggtgtgaacctgatcgtttcccgtaagatggtcgtaacgctgggtgcagtgctgatgattggcccgggtatgatcggcctgttcaccaacccgtatgtcgcaattatgctgctgtgtatcggtggttttgcccaccaggcactgtctggcgcgctgattacgctctcttccgatgtgtttggtcgtaacgaagtggcaacggcaaacggtttaaccgggatgtccgcatggctggcaagtacgctgtttgcgctggttgtcggtgcactggctgacaccatcggcttcagcccgctgttcgcagttctggcagtgttcgacctgttaggtgcgctggttatctggaccgtgttgcagaacaaaccggcgattgaggtggcgcaggaaacacataacgatcccgcaccgcaacattaacgtttcgtgtaagttttagtttcccttcaaagccgccttctcaggcggctttttcatcactgcgagtagagctaaactcgcaaaagtggtataacaaatatagtctgccgtatcatgcctggagcgcatatggaaatcactgaaccacgccgtttgtatcaacaacttgccgctgacctgaaagagcgcatcgaacagggcgtctatctggtgggtgataaactgcctgcagaacgctttattgccgatgaaaagaacgtcagccgtacggtagttcgtgaagccatcatcatgctggaagttgaaggctatgtcgaagtgcgtaaaggttcaggtattcatgtggtttccaaccagccgcgccatcagcaggcggctgacaataatatggaattcgccaattacggtccgtttgagttgcttcaggctcgccagctcatcgaaagtaatattgccgaattcgcggcaactcaggtaacgaaacaggacatcatgaaactgatggccattcaggaacaggcgcgcggcgaacaatgcttccgtgattccgagtgggatttgcagttccacattcaggtcgctctggcgacgcagaactccgccctggcggctatcgtggaaaaaatgtggacccagcgtagtcataacccgtactggaaaaaactgcacgaacacattgattcccgtaccgtcgataactggtgtgatgaccacgatcaaatcctcaaggcgctgattcgcaaagatcctcatgctgctaagctggcaatgtggcagcatctggaaaacaccaagatcatgttatttaacgaaaccagcgacgacttcgagttcaatgccgaccgctatctattcgccgaaaacccggtggtgcatctcgatacagccaccagcggcagtaaatgaaattcctgtccgacaggcgctgcaatgcgcctgtttgtctcgtcggtaagcgaaaagtataaagtgtcagcctgtgtaaatcctctcgccaccctcccctgcattcagcaaaatcagactccacggacatgtaattttgataacgaacaacgttgacctttgttacaattagattcaatttgaatttatgtttttgaatgctttcttatctcacgatttaacagggaatagttcaggctgtgttgatgtatcaaacccgcagaacataccaaaacagcaataacattgcggtagtgcatcttttaaaaccagcgtggcgttaaccgattcaccaggaataatgaatggaacttttgacccaattgctgcaagccctgtgggcgcaggattttgaaaccctggccaatccatcgatgattggcatgttgtattttgtcttgtttgtaattttgttccttgaaaacggcttgcttccggcggcctttttaccgggcgacagtttactggtattggtcggcgtgttgattgcgaaaggcgcgatgggctatccgcaaacgattctgctgctgaccgttgccgccagcctcggctgctgggtcagctatattcaggggcgatggctgggcaatacccgcaccgtacaaaactggctatctcatttacccgcgcattatcatcaacgcgcacaccatctttttcataaacacggtttatcggcgctgttaattggtcgctttattgcgtttgtcagaacactgctgccgacgattgccgggttatcagggctgaataacgcgcgctttcagtttttcaactggatgagcggtctgctgtgggtattgatcctgacaactctgggttacatgctcggcaaaacgccggtatttttaaagtacgaggaccagctgatgtcatgcctgatgctgctcccggtggtgctgctggtgtttggcctggcaggttctctggtcgtgttatggaaaaagaaatatggaaatcgggggtaagggatgcaaatacctcgcatgtcgcttcgccagctagcctggtccggcgctgttttacttctggtcggcacgctgttgctggcctggtccgcggttcgccagcaagagtctacgctggcgattcgtgccgttcatcaaggcacaacgatgccagacggtttttcaatctggcatcaccttgacgctcatggcattcctttcaaaagtatcacccccaaaaacgacactctgttaattacatttgactccagcgaccagagcgccgccgcaaaagcggtcctcgacagaacattgccccatggctacatcattgcgcagcaggacaataacagtcaggctatgcagtggctgacccggttacgggataactctcatcgcttcggataacttcctgttatccgaaacatatcactcactttggtgatttcaccgtaactgtctatgattaatgaggcggtggttaacactaccgcttcgttgtctggacaatcgttcctttgtaataggtccgaatcacaatggaaggttcaagaatgaaataccgcatcgctttagctgtttctctctttgctcttagtgccggtagttatgccactaccctgtgtcaggaaaaggagcaaaatatccttaaggagatcagctatgccgaaaaacaccaaaaccagaatcgtattgacggtctgaataaagccctgagtgaagtccgggccaactgttcagatagccagctgcgtgccgatcatcagaagaaaatcgcaaagcagaaagatgaggtggcggaacgccagcaagatttagccgaggcgaagcaaaaaggcgatgccgataagattgccaaacgcgaacggaaactggcagaagcgcaggaagagctgaaaaagctggaagcgcgcgactactaactcacaatagtcactacttactcacctggagaaaactatgtcgaaagaacacactacggaacatctgcgtgctgagttgaaatccctttccgatacgctggaagaggtgcttagctcatctggcgagaagtcgaaagaagagttgagtaagattcgtagcaaagcggagcaggcactgaaacagagccgttatcgcctgggtgaaaccggtgatgccattgccaaacaaacccgtgtcgcggcggcgcgtgccgatgagtatgtgcgcgaaaatccgtggacgggcgtgggcattggcgctgcaatcggtgtagtgctcggcgttctgctgtcgcgtcgttaattatggcggacactcatcacgcacaagggcccggtaaaagcgttctgggcatcgggcagcgaattgtttctatcatggttgaaatggtagagacacgtctgcggctggcggtggtggagctggaagaggaaaaagcgaatctctttcaacttttactgatgctgggcctgacgatgcttttcgctgcatttggtcttatgagcctgatggtgctaattatttgggcggttgacccgcaatatcgcctgaatgcgatgattgccaccaccgtggtgttgctgctactggcactgattggcggtatctggacgctacgtaaatcgcgtaagtctacgttgctgcgccatacacgccatgagttagcaaacgatcggcagctgctcgaggaggagtcccgtgagcagtaaagtcgaacgtgaacgacgtaaggcgcaactgcttagccagatccagcaacaacggctggatctttccgccagtcgtcgtgaatggctggagacaacaggcgcttacgatcgtcgctggaatatgctgctaagtctgcgctcctgggcgctggttggcagtagcgtgatggcgatctggacgattcgccatcctaatatgctggtccgctgggccagacgcggttttggcgtatggagcgcctggcgtctggttaaaacgaccctcaagcagcaacagcttcgcggttaacttccctctggccggagccattccggccttatccctcaaattttttgaagatttttgacagttttccttgctaacaatcatcattcaccacgtttatgattctctccatcgacagcaacgacgctaataccgcgccattgcacaaaaaaacaatcagcagcctgagtggcgcagtggagagtatgatgaaaaaattagaagatgttggtgtactggtagcgcgcattttaatgccgattctgtttattaccgctggctggggaaaaattactggctacgcgggtacccaacaatatatggaagcaatgggcgtcccgggttttatgctgccactggtgattctgcttgagtttggtggtggtctggcaatcctgttcggtttcctgactcgcaccacagccctgtttactgcgggctttacgctgctgacggcatttttatttcacagcaactttgctgaaggcgtcaactcgctgatgttcatgaaaaacctgacaatttctggcggattcctgctgctggcaattaccggtccgggcgcgtatagcatcgaccgcctgctgaataaaaagtggtaagcacgcgctatacttaacgataaaaaacgaggaggaagctcctcgtttttgctattggaggagagaaaaatgggtcaactgattgacggcgtctggcatgacacctggtacgataccaaatctaccggcggtaaatttcaacgttcagcttccgcatttcgtaactggctcactgccgatggcgctcctggccccactggcacaggcggttttatcgcagagaaagatcgttatcatctctatgtttcactcgcctgcccgtgggcgcaccgcacgctgatcatgcgcaaactcaaaggactggaaccgtttatttccgtttccgtagtgaacccgctgatgctggaaaacggttggacctttgatgacagttttccgggagcaaccggagacacgctctatcaaaatgaatttctgtatcagctttatctccacgccgatccacactacagcggacgagttactgttcccgtgctgtgggacaaaaagaaccacaccatcgtcagcaacgaatcagcagaaatcatccgcatgttcaataccgcgtttgatgcgctgggcgcgaaagcgggtgattactaccctccagccctgcaaacaaaaattgacgaacttaacggctggatttatgacaccgttaacaacggcgtgtataaagctggttttgccaccagccaggaagcttacgacgaggcggtggcgaaagtgtttgaatcgctggcacgactggagcagattttaggccagcatcgttacctgaccggcaaccagctaaccgaagccgatattcgcctgtggactacgctggtgcgttttgatccggtgtatgtgacccacttcaagtgtgataagcaccgcatcagcgattacctgaatctgtacggttttctgcgcgatatctaccagatgccggggatcgccgaaacagtcaatttcgatcatatccgtaatcattacttccgcagccataagaccatcaaccctacggggattatttcaattggtccgtggcaggatctcgatgaaccgcatggacgagatgttcgcttcggttaaaaaaaggcaccttacgaggtgcctctgataattagctaagtgcatgttgttcatgtcggatgtggcatgaacgccttatctgacatacaaaacattgtacattcaatagattgcataacccgcgcagaccagataagcgtagcgcatctggcgattttgcgcttgtcatcagtcttagcgcgccttcacggcactttattaattccttgaacgaatatttactgccatttcattcacgtctattcttaatttgctgctttaaaaacaagtgattgagcaaaattgaggcaaaaatggactggtatctgaaagtactaaaaaattatgtcggtttccggggtcgtgcgcggcgcaaagagtactggatgtttattctggtcaacatcatctttacgttcgtgctggggctgctggataaaatgttaggctggcaacgcgctggtggcgaaggcatcctgacgacaatctacggtattctggtgtttttaccgtggtgggcggttcagttccgccgcctgcacgacaccgaccgctcggcgtggtgggcactgctattcttaatcccgtttatcggctggcttattatcatcgtctttaactgccaggcgggtacgccaggcgaaaaccgctttggaccagatccaaaactggaaccttaaaacaaatctgctcgccggatgtctgactcatccggcttttatcattatgttgatgaatgaataatttactaatgtttatttaaaatatttcaatgtcgttatataaattacctataaaaaataaccatgtatttatcttaaatatcaaaacctttataacatccgaaaaagaaagatacgaatagcatttacacaatacccggaatagactttcgtcacttttaattaaagggatgtttttatgcagtggtatttgtccgtattaaaaaattatgttggtttctctggtcgcgcacgtcgtaaagagtactggatgtttactctgattaacgccatcgtcggcgctattatcaatgtcattcaattgattttaggtctggagcttccatatctgtctatgctttatttgctggcaaccttccttcccgtccttgcgcttgctatccgtcgcttacacgataccgaccgttcaggtgcctgggccttgctcttttttgttccgtttattggctggctcgtgcttctggtttttttctgcacagaaggtacttctggcagcaatcgttacggaaacgatccgaagtttggttcaaattaatcttagaattggggcgatatttcgcccctttttattaacaataataaatattattttccgttaaaaagtttgggaatttcccgcagacaccaggatttcgcttcccccatactgtcacgacgccaggccataataatatcgatctcgctggtcgattccgggctgacgacacgcaaccgcccttccgcaatatctttttcgaccataggatacggcatcgtcgccacgccaagccccgccagtaatgcctgacgtttatcttcaatcgtgctcaccgttaagcgcggctgtttgtccagcagctgtacggtcaacaccgggcgctcacgagcggtatccgccaccgcaattccacgatatttcacacgcgtcacttcagataacggttccggctcctgatgaatcgggtgatcaggcgcggcaacgtagacgttcattaacgtatagagcttgcgcgagttgatctccgacgaggaacgaaaatgcatatccggcgcgataacaatatccgcccgcccctgctccagccgttcccacgcccccgccagcacttctgtgatgattgccagttgggtattggcttttgccgccagtttgtcgattaacgggaaaaaggcaggtgtcggtaccagcgcttcggtcacaatggtgagatgcgtttcccaaccgcgcgcgagagcttccgcatcagtagtcagtttatctgcggcttccagcaaaacgcgccctcgctccaacaacatcctcccgacattggtgaatttggtacgatggcccgagcggtcaaacagcaccacatccagctcttcttccagtttttgcatggtgtagctaagtgcggaaggcacgcgtcccagctcatccgccgccgccgcaaaactgccccggcgatcgatcgcatccataacccgtagtgcttccagcgttaatgccctttctttggccatttcgttctcattcaggaaatttgaacataccgggcagaatatctggctaacaatgtagcgtccagccccttaccataaaaggaagtaaagagaggtcaagaattatgattactacccgaactgccaggcagtgtggacaagcagactacggatggttgcaggcccggtatactttttcctttggacactacttcgacccgaaattgttaggctatgcctccctgcgtgtgcttaaccaggaagtgctggccccaggtgccgcctttcagccgcgaacctatcccaaagtcgatattttaaatgtgattctggatggagaagcagagtatcgcgatagcgaaggcaatcatgttcaggccagcgccggagaggcgttgctgctctctacccagccgggtgtcagctatagcgaacacaatctcagcaaagacaaaccgttaacgcgaatgcagctttggctggacgcctgcccgcagcgagagaatccgctgattcaaaagctggcgcttaatatgggcaagcagcaattaatcgcctcgccagagggtgcgatgggaagcctgcaattacgccagcaagtgtggctgcaccatatcgtgctcgacaaaggcgaaagtgcgaatttccagttgcatgggccacgcgcgtatttgcaatcgattcacgggaaatttcatgcgcttacgcatcatgaagagaaagcggcgctgacctgcggtgatggggcgtttattcgtgacgaggctaacattacgctggttgccgattccccactgcgcgctttgctgatagatttgcctgtctagttgtttttacagggagatgatgatgagtaaaaaattggccaaaaagcgccagccggtgaagcccgtggtggcgaaagaacctgctcgcaccgccaaaaattttggctatgaagagatgttgagcgagctggaagctatcgtcgcggatgctgaaacgcgtttagccgaggatgaagctaccgcgtaaagacaggttgccggatgcggcgaaaacgccttatccggcctacaaaatccaacaacattaacgaattaaacaacccgtaggccggacaagatgcgccagcatcgcatccggcacgatccccaaaacctggcgtttatctggccttgctcgccataatctcgataatctgccgatccgtttgctgcatcgaatggcttgctaacgcacacaggttggcaatcgactgctcaacatcatgcgccacaatcccttcattgccggtcacggcggtatcatccagcgccattaacaccgctttccacgcagccgaagcactggtcgaaaccttcatcgcgcagctgttcgacgcaccatcgcaaatcatgccgctgacatcgccgatcatactgctgatcgccatcgagatggtttcataacgcccatccaccagccatgccatcccggcggcggcccccattgctgcggtcgttgcggcacacagcgcagacaaacgcggtaactggttatggatgtaaattgcgctcaaatgcgaaagcatcagcgcacgcgccagccgttcatcatccgctccgaagtgttctgctaccaccaccacaggcattgttgcggtaatcccctggttacccgagccggagttactcatagccggaagcgtagcgccgcccatacgcgcatcggatgccgcgctggtacgaatcacaatggatgaagagagatctttcgccagcaaaccgcgctcgcactgtttttccagcgtcgcgccaatatgcagcccccacttaccgctcaaaccttcctgcgataacgcacaatttagcttcgcggaatcgagaataaagcggatcgccgcaaacgggacttcattgacgaacttcaggatctcagccagcgtcgttctggaaagcaccgtcagcggagactcttgctcgccctctgccacacacgcctgctgggtaaacaccacaccatcgtgcgtctcgatatgcacaatgttggtatgcccgccgacgatggtgacacacgcccacttctcaccgttccagactttggcgcgtgagaagaggatttcatcgcaaggttcctggatcttaacggagactttccccgccgccagcagtgctttggcatcggcaattgcctgcgctgttgcgtctttcagcacttccagcccggcgttggcatttccacctaacgcccccagcgccgccgcaatcggcagccccaccattcccgtgccgggaacggtgacgcccagaccgttcttcatcagatttggcgaaacccaggcttctacacgttcaaccggaccttccagttctgccgcagcaaccgccgccgccagcgccagtgaaatcggttcagtacatcccagcgccggttttacttcctcctgaacggcgaggatgtaacgctgccataacggatttaaagtcgaatcaaacatattaaaaaccttaaaatttcaggtaaatcaagaaaatgccaggaacggagaaacacacagcaacaaaccagtgacgataatcaggtacagagacatccctttgtatttgtgcaatgctggtactttgtaaaccagccacgccgggatcaggcaccctaccatgccgaaaatcgggctacagatagaggtgaagctcaacaccggtgcgttcagtacgatggcgctccaggccagcaaaatggcgaaaatcatgatgccgcgctgaacgagattttcgttaatcttctcggcaggcatcttgcgacgcaggatgttcattacgatcccttgcgttgcttcgcgaaagcctaaatagacgccaaagaatgcagtcatgacagcaaagatattgagaatgacgctgaccactttcacccacgctgcgccgtcaccgctaataaactgtgcggcaatcgccagcgcggaaatattctgctcataggcttttaccgcttcgtcatgtcccatcgccagcgtgaacgacacggcgtagaaaaagacggtgacaaacaaaatgccaaacgcgatattcattgcccgcaatgctttatgccgcgccacttcaattgatttttcccgcgagcgataagagatcaccatcggacttaacgtctggataaacagaatcgacgtcagggtaaacggcagcgtaataatggcgtttttcaccagcagccccagcggcggtagcgaaccgacgttatacagatgccacattcccaccatcgacacgcccagcgccgcgaccaccagcagcttggtcagcaccatgccggtcgaaattttgaataacaatttctcgccgcgtgaggagatcgccaccagaatgcaaatcagtaccagaccataaaagggactgtctgacagcaacccttccgtcacgccgaaggtatgcaggtaggaagcactatcgttggtgatggcggtggaatagacgaacatccaaatcaccagcattacgaaatagagcgcacctaacaggatgccccagtttttacctaaataaccgctaatgacgctcgggtaatctttacattctggtgattctgccagcgtattaataaacaatcgctgaaacagatacattgccgggtaaccaatcaccgatgagagcaaaaatacccacaatcccatcaaaccgacctgcaccgggagaaaaacaatccccgcgccaatcgccatcccgatactcataatcacccagccggtgtcagtactgtcgaatttgatcgcttctcgccactcgctctcactcattccagcacgacccgccggggtcgaagcgtctgcaatgacgcctttattcgatgcaatttccataatttctcgctcaatattttgtagggcttattatttttttccgagccgcatcaaggcgatatgcggtctacgtttttgcaggcgagttattagaataaagaaatgatacgcgcgaggtcagagaaaatcttcacaatcaagactttgaaataacggagatggataagaattttctactaaattaatcgcaggagaatattcattctctatttgcggcagatcacaaaaaaaaggtgcacatttgtgcacccaaggatgaaagctgacagcaatgtcagccgcagaccactttaatggccagtcctccgcgtgatgtttcgcggtatttatcgttcatatctttgccggtttcatacatcgtctcgatcactttatcgagtgaaacacgcggtgccgaggtgcggcgcatcgccatccgcgcggcgtttactgctttcacggcattaatggcattacgttcaatgcacgggatttgtacctgtccggcaaccggatcgcaggtcagcccaaggttatgctccatcgcgatttccgccgcattgcatacctgcgccggactgccgcccagtagttcagttaaccctgccgccgccattgaacaggccacgccaatctccccctgacagccgacttccgcgccagagatggaggcgttcattttatacagcgcgccaatagcccccgcggccagaaaatagcgggcaattgaccgctcgtttaccggacgacggaacttatcgtaataagccagtactgccggaataatgccgcacgcaccgttagtcggtgccgttaccacgcgcccgccagctgcgttttcttcactaaccgccagcgcgtacatgttgatccagtcgatgacattcatcggatcgttagagatgttatcgctggaaaccagctgacgacgcagcgctacggcacggcgcggcacattgagcggaccaggcagcacgccttcagtgttcatcccacgttcaataccgtcatgcatcacttgccagatacgggcaaaaccggcgtcaatttccgctttgctgcgcagcgctagctcgttgtgcatcatcagaccagatatagacaggccgttgtaatcacacattttcagcagttcacctgctgagtggaaatcgtaaggtacggacgtttcgacatcgtgcgacaggccgaagtgttcttcttcgacaataaacccgccgccgacagagtaataggttttacttaatagctcttcctgtcccttccaggcagtgatccgcattccgttctcatggcgaggcaacatttcgggatggaagataatgttctttgctacaggaaaatcaacaatatgcgcaccagatgccactggcagccgcccgctgcgcgttactaactctataaatgcagggatctcatcaatgacaacatcctgcggactgtttcctgccagtcccatgatgatggcgacatccgtggcatggcctttgcccgtcagtgacaacgacccgtacagatcgaccacaatatggctcgtcgcggttaataagccgctactttccagccgatcaataaaactttttccggcattcattggccccacggtatgcgaactggagggaccaatcccaattttgaaaatatcgaatgcactaatcatatccacaccctcggattgccgttcagtgaagtggagcggaacgaccttacgaccgtcccgctcacgaggctttacgcactacgtactgcgatggcttcaatttccagcttcacatctttcggcaaacgcgcgacctgcacacagctccgggtcggataggtcgcctgatgctcatcgaagaactgcttatagacttcgttgatggtggcaaaatcattcagatcggtgataaacacggtcatcttgatgatatcgcccacgctcagcccggcagcaaccacgatcgctttgacgttttcgaggcttaaacgcgcctgatcttgcacatcagccgggatctcaccggtctgtgggcaaaccggtatttgcccggaggtgaagaccatgctgcctaaatcaacgccctgaacataagggccgattgcgcctggggcacgttgcgtttcgataatctttttcatacatcctccggcgtcagagcgcctgggtaaaggtacgtgaaataacatcctgttgctgttcacgggtcagtgcgttgaagcgcacggcgtagccagagacacggattgtcaggttaggatatttttccgggtgctcgatggcatccagcagcatttcccgattcattacgttgacgttgaggtgttgaccgccttcgacatccgcttcgtggtggaaatacccatccagcaggccgacaaggttggttttacgtactggatcttctttgcccagcgccgcaggaacgattgagaaggtgtacgagatcccatctttggcgtaggtgaacggcagtttcgccaccgacgtcaatgaggccacggcacctttgcggtcacgaccatgcatcgggttagcgcccggcgcgaacggtgttccggcgcgacgaccgtccggcgtattaccggttttctggccgtacaccacgttagaagtgatagtcagaatcgactgggtagggacggcgttgcgataggttggcagcgctttaattttcttcataaagcgttcaaccaggtcgcaggcaatgctgtctacgcgctcgtcgttgttgccgtactgcggatattcaccgtcgatttcaaagtccaccgccaggccgttttcgtcacggattggtttcacgcgggcatatttgatggcagacagggagtccgtcgccaccgacaggcccgcgatgccgcatgccatagtgcgatagacatcacgatcgtgcagcgccatcagcgaagcttcgtagctgtacttgtcgtgcatgtagtgaatgatattcagcgcgctgatgtactgcaccgccagccagtccatgaagtgatcgaggctgtccatcactttgtcgtaatccagcacgtcgtccatcagcggtgctgttttcggcccgacctgaatcttcagcttctcgtccaccccgccgttaattgcgtagagcagcgttttcgccaggttagcgcgtgcaccaaagaactgcatttgcttaccaatcaccattgggctgacgcagcaggcaatcgcgtaatcgtcgctgttgaagtcagtacgcatcagatcgtcattttcatactgcaaggaagaggtgacgatcgacacctgcgcggcatattttttgaaggcaatcggtaattcttccgaccaaagaatggtcaggttaggttccggtgccggccccatagtgtgcagggtgtgcaaatagcggaaggagtttttggtcaccagcgtacgaccgtccagccccatcccgccgatcacttccgtcgcccagattgggtcgccggagaacagcgaatcaaattccggtgtacgcaggaagcgtaccatacggatcttcatgatgaagtgatcgatcagttcctgtgcctgctgctcattgagtacgccagctttaaagtcgcgctcaatgtagatatcgaggaacgatgccgtgcggcccagcgacatcgcgccgccattttgcgatttcactgccgccagataagcgaagtagagccactgcaccgcttcctgcgcattctgcgccgggcgagagatatcaaagccatatttcgccgccatttcctgaatctgcaacagcgcatgacgatgctctgccagctcctcacgcagacggatggtggcttccagatcctcgcctttttccagacgagactggagatcggcaaattgcagttcgcgttcacgtaccagataactgatgccatacagcgctacgcggcgatagtcaccgataatgcgcccacggccatagccatctggtaaaccggtcagcacgccagatttacggcagcgcagcatatccggtgagtaaacatcaaatacgccctggttatgggttttacgcagatcggtaaacagatattcaaattcactgtccatttctcggccataggcgtggaatgaacttttaatcatattaatgccaccgaacgggtgtagcgcacgtttcaacggcgcatccgtttgcaggccaacaattttttccagcggctggttaatatatcccgcatcatgagcggtaattgtggtggcaatattggtatcgaaatcaaccggcgcgtgggttgcattttcgatacggatgccttccattactttttcccacaattccgtggtggcaggcgtcgcttcggcgaggaaagattcatcgccttcatacggtgtatagttatgttgaataaaatcgcggacattaatttcgtttttccagtccgtacctttaaagccaagccatgcgtcggcgtacagcttatcgctggtatcaatatctaccttcatgaaaaataatctctctacaatacttcaactaaattatgcaaattctgcgggcgcgttaaggaaggtgcgaacaagtccctgatatgagatcatgtttgtcatctggagccatagaacagggttcatcatgagtcatcaacttaccttcgccgacagtgaattcagcagtaagcgccgtcagaccagaaaagagattttcttgtcccgcatggagcagattctgccatggcaaaacatggtggaagtcatcgagccgttttaccccaaggctggtaatggccggcgaccttatccgctggaaaccatgctacgcattcactgcatgcagcattggtacaacctgagcgatggcgcgatggaagatgctctgtacgaaatcgcctccatgcgtctgtttgcccggttatccctggatagcgccttgccggaccgcaccaccatcatgaatttccgccacctgctggagcagcatcaactggcccgccaattgttcaagaccatcaatcgctggctggccgaagcaggcgtcatgatgactcaaggcaccttggtcgatgccaccatcattgaggcacccagctcgaccaagaacaaagagcagcaacgcgatccggagatgcatcagaccaagaaaggcaatcagtggcactttggcatgaaggcccacattggtgtcgatgccaagagtggcctgacccacagcctggtcaccaccgcggccaacgagcatgacctcaatcagctgggtaatctgctgcatggagaggagcaatttgtctcagccgatgccggctaccaaggggcgccacagcgcgaggagctggccgaggtggatgtggactggctgatcgccgagcgccccggcaaggtaagaaccttgaaacagcatccacgcaagaacaaaacggccatcaacatcgaatacatgaaagccagcatccgggccagggtggagcacccatttcgcatcatcaagcgacagttcggcttcgtgaaagccagatacaaggggttgctgaaaaacgataaccaactggcgatgttattcacgctggccaacctgtttcgggcggaccaaatgatacgtcagtgggagagatctcactaaaaactggggataacgccttaaatggcgaagaaacggtctaaataggctgattcaaggcatttacgggagaaaaaatcggctcaaacatgaagaaatgaaatgactgagtcagccgagaagaatttccccgcttattcgcaccttccttaactttgcctaaatgaatggcatccaaagcaatcattttttcttcgttagtcggaataacggcacaaatgacacgcgcattttcactggaaacaattcgctcaccacaggagttagagcgattattcatttctgtatcaatctctaagcctaatacagccaaatgttccatgaccagacgacgaattaagcttgaattctctcctattccgccggtgaatataattccatccaggcgacgtaatgaagctgcgtgtccggcaatatgacgggcaattcggtgaacaaaggttttaattgccagttgcgcgcgttcgtgaccttcatgccaggctttttccagaacacgtaaatccgaagaaagaccggaaatacctaataatcccgactctttattcactacgcgttccaggtcacccaggctctggttggtttggctggcgacccaggacatcgcaccaaagtcgacatcgccactgcgggtacccatcatcaagccttccagcggcgtcattcccattgaggtatcaacactctgaccgttgcgaaccgcgcagattgacgcgccattgccaagatgcgccacaaccaggccggagtcatcttccgccagattcagcagcgaatgtgcgcgctgggaaacatagcggtgcgacgtgccgtggaaaccataacggcgtacacctaactcttcataatatttccacggcaggccgtataaataagcttccggagccatcgtctggtggaaactggtatcaaataccgccacctgagttacgcccggaaataattgctgcgccgattcaataccacttaaattggcgtaattatgcaggggtgccagtggagaaacgcgacggatattatcaatgacttcatcggtaataatggcggactcggtaaaaatactgccgccgtgagcgatgcggtggccaattaaggccacactgtcatttaaattccgtttttccagttcaaatgcaattgccttcaatgcaccttcgtagctgtggtgagccagcggtgctggctctcccccatttacggataagaatgcattttccgagttaataccgtcggcaatacctgacattaatacttcacagtcgctggcatcgagcacggaaaacttaatcgaagacgaaccacagttaataaccaaaacaaccggaaattcattcatctcttttctcatcctgagttacggattaaaacagtttgtatacgatgttcaggatggtcagcagaccaatcacggtaacaaacacgttatccagacgaccacggtatttcgccagagacggcgctttacggatggcatacatcggcaacaggcacagcagggatgcgataatcggtgcgcccatggcttcaatcaggtcaaggatgttcgggttggcgtaggcaacaacccaggtggagcccatgatgaagatcatgctgatagtgttcagtttacccagcgacactttagttttgtcgcctttataaccaaacttcaggaccaggccattcagaccttccagcgttcccagatagtgaccgaagaaagatttgaagatagccacgagtgcgatgatggaagccgcatattccagtgtaatcgcgaacgttgttttggtaccggtcatggacgcaaagtggttagccagataagaaagcactggaatattctgcgctttggcttccgccatgttggccggagacagagtaaacaggcagctaaaggcaaagaacatcaccactgcaaccatcagcatgctggcacgagaaatgatttgggaacatttacgttcggtgaagtcgcgaccgaagtctttctcatactcttcacgcttagaaaccacgaaggaagagacgattggcgagaagttaaaggagaaaaccatgatggaaatccccagccagacagtgatcaggataccgtcatgaccggttaacgacagcgaaccgaggtcaacctggtcgataactgcagagttccagtaagggatcagcgacaaagaaatcagcaccaggctggcgataaacggccataccaggtagctcatcactttaaccatcagatccttaccaaaccagatgacgaaagccatcagcagcaacaggaacagcgccacaaagccgcgattcagcggtgcaaagccgagctggttttcccagaacgtcataaaggtattggtaatagtaacgccataaatccacagcagtgggcaaatcgcgaagaagtacaggaacgtgataaccacgccgccagttttaccaaaatgctcttccaccgtttccgtaatgttgccggaagggttagagccagaaagacacagacgcgccagcgcccggtggcaataaaacgcgatggggtatgccaataccaacatcagaagaatcgggatcagtccgccaaaacctgcgcggatagggaagaacagcaccccggcgccgattgccgtaccaaacaagcctaacgtccatgtggtatctgatttacgccaggacgattgttttgtctggctggatacaatgctatctgaagtactcatatcctatcctcaacgaattaattaagcgtcaacgaaaccggtgatttgagagacgcgagaaagatcgatattgccgccggaaataatactgacggtttttctgttttgaatatattggtctaatttaccgcttaataatgcagcacatgccagagcgcctgcgccttcggtgacgactttattgcgctgaattaaggcaatcatactgtttctgatttcgtcttcgctgaccagcacgatgtcatcgactaattcacgaacgatttcgtaagttaaattacccgggcgggagacatcacaaccatccgccagggtgccggtagttcggtgcgtggttatttctccggagtggaaagaagccgccatgccgtgaacgttttcagactgtacgccaataacacgaatggtcgggttaatagatttaattgccaccgcaataccagcaattaaaccgccaccaccaattggcacaatcacgttatcgacatcatagagatcttccataatttccagaccaatcgttccctggccagcaatcactttcggatcatcgtaaggtgggataaaaatacggccttccatttcgacaatttcgctcactttagcgatagtgtcgttgaagttatcaccatgcagaacgacttctgcggagtagtcgcacgttgccgctactttggattttggcgcaccttttggcatcaccactttaccgtcgatacccagcatcgcgcaggagagggaaaccccttgcgcatggttgcccgcagaacaggccaccacgcctttgcgtttttccgcatcggtcagtgaacttaatttattaaatgcgccacgaattttaaatgaacccgtacgctgcatattttcaaacttcaggaatatttcacctttgcaacgttcactaaaatagttggagcgaggcatgcctgttttataaattcgcccagccagtcgttgtttcgcttcaataatgtcatcaatagcaaccggcagatcgtatgtaatatgcattataaaacctcttcgcctgaattaaatatgtaggtaaccgtaaccgacacctgcaagacagacaggtggattatttatgtttaaataaaaacaaataactaaccaacttctattaattgccttcgtctacacccattataagatgaatactctttggctaattccaccaaaaccgatgctgcttttttaatacgataatttttcgaccataccgcggcatattgtgccacaggtaatgtttcttcaaccggaatagtaataaattgattagaaccaaaaggtgacgtcatatcacaaggaattacagttaagaaatcagcattgagaacaagattataaattgtcacgactgagtcggttttaacgatgttttcaatactgatgccatttctttgtaacgtagtaagcagttcgctgtagtaccccatattagtttgtggcaacacccactgttcgttcttcaacgactccagcgtggtggtgccggtgcatgttcgggacttactggctaccagcacaaactcggactcgaacagcggctcaacatgtaaatcctgaagcttcatttctgcacttaacgtaccaatcgcaaaatccagtcgaccgtcgcggattgccggtaagaacgaagacagttgcgcttcatacatagaaacctgcgctttcgggaacacctctttgaacttgttgatcatccctgacataaaagtaaaaccaatcaatgaaggaaaaccaaatgagacttccaccaccgcctcagaagacataccgcttatctcattaaccatatttttcatttcacgggtaatggattcggaacgggagagtaacaattgaccggcaggtgttaatgttacaccggtatttttccgcaccactaattccacaccaaaataatcttcaatatcgttaatgattttactgacggccggttgagttaaccctaattcttttgcagccgagccgatagaaccacttctaatgacttcctgaaagactaccaggtgctgcgttttcggaagaagaatagtgctcataacgacctacgttaattacctcattgacggcatgaagtgtatcaaaatgaaatgaacaggatatgtgcgaccactcacaaattaactttcaatactttccagagtatcgttattacaattaaatacctttaaatatcaacaagttaaagtataaaaatcagcataaaccctgatttttgtcaaaaaaaatgacggggataaccatattttatggcgataacatcattcgttatgtggttaatacaaaaaaggggctgagaccatatttcaagcaattaccggataattaccaggcaaaatttgagttaaatttaatgagcaagttctcaaattttattataaataaaccattttcagtgataaataatgcggcatgtcacattttttcacgctatttgttggagaacaaacatttattttatcaatattttaaaatttcgaatacatgtattgatcatctcgaacaattgattaacgtcaactttttctcttctgacaggacgtcattttgtgaatgcaatcgttttccataaattcttctcccctcataggcgacgaatagcattttgtgttgaggatcacaaaacgaataattgctgatcgccgcgataaggtcagacaaagacaacaagggaaattttcacagagcttttgatcggcgtaggccacagaatgttgcttcgtttactgtaacgccgggtaaatgagcgttttttgatagtgcgaaagaaccctgcgaggaaaataagcatctattattgtttgtcatgatgacaaggcaggcatcaatgaaaggcttcccaattgcgcatatttttcacccttcaatcccgccaatgcacgcagtggttaacaatcacaatagaaatattgattattggacggtaaaaagaaagtttgcagaaattgtctccaccaatgacgttaataaaatttacagtataagtaatgaactgcggagagtattatctgcaataactgcattgaatttctatcatggcgatgttccttctgtcatgatccgaatccaaccggaaaatatgagtccattcattatagatatttctacaggagaacatgatgattatatcatacaaacattagatgtaggcacttttgcaccttttggtgaacaatgtacttgctcagccgtcaataaaaaagagctggaatgtattaaggagacgatttctaagtattgtgcaaaattcacccgaaaagaagccatcttaaccccccttgtgcactttaataaaaccagcattacttcagattgttggcaaattctctttttttcacccgatcattttaataatgatttttattgattatttataaaggataaaataatgttccctgtttcatcaattggtaatgatattagtagtgatttagtccgtcgaaaaatgaatgaccttcctgaaagcccaacaggaaataacctcgaagcactagcaccaggtatagaaaaactaaaacagacctctattgaaatggtcactttacttaacacgttacaacctggtggaaaatgcattatcactggtgattttcaaaaagaattagcgtacttacaaaatgtaattctttataatgtctcgtctcttcgtctggattttttaggttataacgcccaaattattcaacgatcggacaatacttgtgaacttaccattaatgaaccgttaaaaaaccaggaaatatccacaggtaatatcaatattaattgcccattaaaagatatttacaatgaaatcaggaggttaaacgtaatttttagttgtgggactggagatatcgttgatctatcctctctggacttacgtaatgtcgatttagattattatgatttcacagataaacatatggctaatactattttaaatccttttaaattgaattcaacaaattttactaatgccaacatgtttcaggttaattttgttagttcaacacaaaacgccacaatctcctgggattatttactaaaaataacgcctgttttaataagcattagcgatatgtattctgaagaaaaaatcaagtttgtcgaaagttgtttaaatgagcctggagacattaccgaagaacaattaaaaattatgagatttgcaattataaaatctataccaagggcaactcttacagataaattagaaaatgaattaacaaaagaaatatataaaagctcatcgaaaatcatcaattgcttgaacagaattaaattaacagagatgaaagaattctcatcagaaaaaatatatgattacatcgatataatcattgaagattatgaaaataccaaagaaaatgcttatctggtcgtcccccaaattaattatactatggatttaaacatagaagactctagctcagaagagttactttcagataataccctcgagaaagacgaaaattctccggacaatggctttgaggtcggggaatataacacatatgaagcatataactcagagaagcaatattttaccagagaggactatacgtatgattacgaccttttaaatgcaatatagacttaataacttcttacaaagtctattattaataccgtagatatttattcatcttaccctgtgcaccaaaagcaaaaactcactgacgcgggtttgaaactgatggcaaccgcaaaaatgcctgatgcgctacgcttatcaggcctacgccatctctgcaatatattgaatttgcgtgcttttgtaggcaggataaggcgttcacgccgcatccggcatgaataaagcgcactcaacaatctgaaacccgccggaacggtttattacgtacatcaggtaaaactgaccgataagccgctttcttttgggtatagtgtcgtggacagtcattcatctttctgcccctccaaaagtaaaaacccgccgaagcgggtttttacgtaaaacaggtgaaactgaccgataagccgctttcttttgggtatagtgtcgtggacagtcattcatctttctgcccctccaaaagcaaaaacccgccgaagcgggtttttacgtaaaccaggtgaaactgaccgataagccgctttcttttgggtatagcgtcgtggacagtcattcatctttctgcccctccaaaagcaaaaacccgccgaagcgggtttttacgtaaatcaggtgaaactgaccgataagccgggttctgtcgtggacagtcattcatctaggccagcaatcgctcactggctcaagcagcctacccgggttcagtacgggccgtaccttatgaacccctatttggccttgctccgggtggagtttaccgtgccacggactgttaccagccgcgcggtgcgctcttaccgcaccctttcacccttacctgatcccgcttgcgcgggccatcggcggtttgctctctgttgcactggtcgtgggtttcccccccaggcgttacctggcaccctgccctatggagcccggactttcctcccctccgcccgtctcccccgaagaggacgacgacgaagcggcgactgtctggtcagcttcggcgcgcagtatagagggtttgcgcgcccttgtcaccccgcgttgcgcattccaatcgccagtgtcgcggcgatattacgtgaagcacggcagatattgtcataagccccgcggaatgcttcgtccaacgtacctatgctggtcaatacgctgaagaccgcatcaatgccatgctgatgtacaacgccaacatcatcggtcaggctacccgcaatgccaatcaccggtttatggtacttcttcgccacgtttgcgacaccaatcggtaccttcccgtgaatactctggctgtcaatacgcccttcaccggtgatcaccagcgtacaatcgtgaatatgttcctccagattcagcgccgtagtgacgatttcaataccacttttcagttccgcaccaagaaacgccattagcgccgcgcccataccacccgcagctcctgcaccggggacatctttcacatcaacatgcagcgcttttttaatgacctcggcatagtgagagaggttattgtccagctcaacaatcatcgcttcactggctcccttttgtgggccaaagatgcgcgatgcgccgttatcgcccaccagcggattggtgacatcacaagcgacgcgaatgacgcaatcttttaagcgcggatcgaggccggaaatatcaatatcattcagagtattaagactaccgccgccaaaaccaatttcattgccgttggcgtcgcataatttcgcccccagcgcctgtaccatgcctgcgccgccatcatttgtagcgctgccgccaatgccgataataatgtttgtcgcaccgctctccagcgcctgcaggattaactcgcctgtgccgcgtgaagtggtcacgagtggatcgcgtttttccgcaggtaccagctccagcccactggccgccgccatttcaataaacgcggttttgccatcgccggagatcccccaactggcattcactttctcgcccagcggccctgtaacccaggcgtgacgttcagccccctgggtggctgcaatcatcgcttccaccgttccttcgccaccgtcggcaaccggaacagaaacgtactgtgcatcaggaaaaatttcccgaaatcctttttctatcgcctgcgcaacctcgctggcagataaactttctttataagagtctggggcgattacgattttcatacctatgcctgttaccacatgacgccggagggcgtttctcttattcggcctggattccaggcccggattgcaatacgccatccgggcacgacgtcattaacgagtaacttcgactttcgccagtttttcgtagtagcacgccagggcgctatgatccgccgttcctaaaccatctgctcgcagtgcctgcatcatctccataaccgcagctgtgagcggcagttgtgcgccgacgccgtgagaagtatccagcgcattcgccagatccttaatatgcagatcaatacggaagcccggcttgaagttgcggtccatcaccatcggcgctttggcatccagcacggtactgcccgccagtccaccgcgaattgcctgataaaccaggtccgggttaacgcccgctttagttgccagcgttaacgcttctgacatcgcggcaatattcagcgccacaatgacctgatttgccagtttggtgacgttacctgcaccgatttccccggtatgcaccacggaacccgccatcgctttcatcaaatcatagtatttgtcgaaaatagccttgtcgccgcccaccatcactgacagcgtaccgtcgatggctttcggttcaccgccgctcaccggagcatccagcatatcaatgcctttcgctttcagcgcttcgctgatttcacggcttgccagcggtgcgatagaactcatatcgatcaataccgtacctggcttcgcgccttcaataatgccattctcacccagcgccacctctttcacatgaggggagtttggcagcatggttatgatgacgtcgcactgttcagcgatcgctttagccgtagacgctgtttctgcacctgcagcaatcacgtcagcaatagcttctgggttacggtcagcaaccaccagcgagtaacctgctttcagaaggtttttactcattggtttacccataatccccaggccaataaaaccaactttcatagtcatatcaatcatctctcttgttgcggtggtggttattttttaaaggtatcagccagtttctgagtggcagagcggaagacgccgagatcgctgccgacagccacaaacgtcgcgccccattccagataacgacgcgcatcggcttcgaccggcgcgaggataccgctgggtttgccgtgcgcgctggcacggttaaaaatgtgctgaattgctttttgtacatccgggtgtgatgcattgccgagatggcctaatgccgcggccagatcgctggggccgacgaagatgccgtctacgccttcggtagcggcaatggcatcgacgttatctacgccctgctgactttctatctggaccagaatagtgatgttcttgttcgactgagcgaaataatccgccacggtgccaaacatattggcgcggtgagaaacggagacgccgcgaatgccttccggtgggtaacgggttgatgccaccgccagctctgcttcctcttttgtttctacaaaaggaatcaggaagttatagaaaccgatatccagaagacgcttaataattaccggctcgttggtcggcactcgcactactggcgcgctggcgctgcctttcaaggccattaactgcggaataaacgtggagatatcgtttggcgcatgttcgccatccagcaccagccagtcaaacccagccaaaccaagaacttcagtgctaatcgggttagagagtgctgaccagcaaccaatttgtacctgtttcgcagccagtgcggctttgaatttattcgggaaaacatcgttattcatcgcttatacctttgcttatttctgcaattccatacgtttaatgtcgccaactacgaagaggtagcagaccatcgccatcagcgctgaacatcccacgaaaaccagtgctgcattgaaggagtgcagttcacttaccaggtagccaatcaccagtggagtgacaatggaggcaacattgccaaagacgttaaagacgccgccgcagaggccaacaatctctttcggcgcggtgtcagaaatcaccggccagcccagcgcaccaaatcctttgccaaagaaagccagcgccatcagcatgaccaccagcgtggtgttgttggtgtagttacataagatgatggtggaagccagcaacattcccagcacaatcggtagcttacgtgccagggtcagggataaaccgcgtttgatcagataatccgagaagacacctcccagcacgccgcccgcaaaaccacacagtgctggaatcgaggcgaccagacccactttcagaatcgacatgcctttttcctgcaccagataaatcgggaaccaggtgaggaagaaccaggtgatggtgttgataaaatattgtccgaaaaatacgcccagcatcatgcggttagagagcaattgcttgatgtaatgcagtttgggtccgcttgctgccgcactgcccggctttttgtggtccatatcgaccaccgcgccattttcagagataaacttcagctcttccgcagacatacgtgggtgatctgtcgggttatgaatcaacttgatccacagcgccgtcagcacaaaaccaatcacccccataacggtaaagacgtgctcccagccccaggcgaaagtcagccagccaagcagcggcgaaaagagcgccagcgagaaatattgcgccgagttaaagatggcggaggcagtaccacgttctttcgtcgggaaccaggcggcgacaattcgggcgttcgccgggaatgatggcgcttccgagaagccgagcataaagcgcataaagaacatggagatccctgcccaggccagcgggaacatatcaacaaagccttgcaggaaggtgaatagcgaccagaaaaagaggctgtaggtgtaaacttttttcgagccaaacttatcaagcagccagccgccggggatttgcatcagcaagtaggcccagccaaaagcggagaagatgtaacccatcgaaaccgcacttaactgcaactcttttgccacttcggtaccagcaatagacagcgttgcacgatcggcgtagttaacggcggtaacaataaaaataatcagtaatattaaatagcgggtatgcacgcctttctttttttcgtcaacggtgtccagaatcattttatttacctcgggtacttatgctgatttttattattatggggaaggtgttatttatgagtttcatttatgccgtaacgacaatgaactcgggaattagtataagcagcgcgagaataataatcattgtgcaaatgctaatttaattaatactatttaaatattattttgagcatatgcacataaggttgcgcgctaaagcacagatttgcgctttaccttaccgggcggcactgcaatccctgaaatgattgacattgatcacatttctgcgtttaaactcctgacattcttatttcacccaatgaagtcatttatttttaaatgagaccaggtcctcattttaataacccctggctggagaatattgcacaatggccaacatcgaaatcagacaagaaacgccaactgcgttttatataaaagttcacgacacagataatgtggcaattattgttaatgataatggcctgaaagcaggaacgcgttttccggatgggctggaattaattgaacatattccccaggggcataaagtcgcattgctggacattccggctaatggtgaaattattcgttatggcgaagtgattggttacgccgtgcgtgcaatcccacgcggaagctggatcgacgaatcaatggttgtactaccggaagcgccgccgttacacacgctgccactggcaaccaaagtcccggaacccttaccgccgctggaaggatacacctttgagggctatcgcaatgccgatggcagcgtgggcaccaaaaacctgctcggtatcaccaccagcgtccactgtgtggcaggcgtggtggactatgtagtaaaaatcattgaacgcgatctgctaccgaaatacccgaacgtcgatggcgtggtggggctgaatcatttgtacggttgtggcgtggcgattaacgcaccggcggcagttgtacctatccgtaccattcacaatatttcgctgaatcctaactttggcggcgaagtaatggtgattggcctgggttgtgaaaagttgcagcctgagcgcctgctgactggaacggatgatgtgcaagctattccagtagaaagcgccagcattgtcagtttgcaggatgaaaagcatgtcggttttcagtccatggtcgaggatattttgcagatcgccgaacgccatctacaaaaactgaatcaacggcagcgagaaacctgcccggcttcagaactggtcgttggtatgcagtgcggtggcagcgatgcgttttctggtgtaacggcaaacccggcggttggctatgcgtctgatctactggtgcgctgcggcgcaacggtgatgttttcagaagtaacggaagtgcgtgacgcgatccatctgctgacaccacgcgcagtgaacgaagaggtcggcaaacggctgctggaggagatggagtggtacgataactatctcaatatgggaaaaaccgaccgcagcgccaacccttcgccgggcaacaagaaaggcggtctggcaaacgtggtagagaaggcactcggctccattgctaaatcgggtaaaagcgcaattgttgaagtgctgtcgcccggtcaacgcccgactaaacgcggattaatttacgccgcgacgccagccagcgattttgtctgtggcacgcaacaggtggcttcgggtatcacagtgcaagtgtttacgaccggtcgtggtacgccgtacggcctgatggcggtacccgtcattaaaatggcaacccgcaccgagctggcgaaccgctggtttgatttaatggatattaatgcgggcaccatcgctaccggcgaagaaactattgaagaggtgggctggaagttgttccactttattctcgacgtcgccagcgggaagaagaaaaccttctcggatcaatgggggctgcataaccagctggcggtgtttaacccggcaccggtgacctgatttcttttggaacgtccctcgcaaaacatggccttagtgccatgtttttattgtttaaagcccccacgtccattaataatgcatttgcattaccttagttcaagcttataatttgagcagaaaacaggctgtaaaaggacagtgaatcatgcccgctaatgctcgctctcacgctgtactgaccactgaatcaaaggtcacgatacgcggacaaacaactatccccgcgccagtgcgtgaggccttaaaactgaagccaggccaggacagcattcattacgaaattctgcctggtgggcaagtatttatgtgccgactgggagatgaacaggaggatcatactatgaatgcatttttgcgttttctggatgcagatatccagaacaacccgcaaaaaactcgtccattcaacattcaacaaggaaagaaacttgtcgctggcatggacgtcaacattgatgatgagattggcgacgacgaataatggattttccacaaagggttaatggttgggcgctatatgctcatccctgttttcaggaaacctacgacgctttagttgccgaagtcgagacattaaagggaaaagatcctgaaaattatcagagaaaagccgccacaaagttattggcggtagtccataaagtgattgaggagcatatcacggtcaatccatcatcaccggcattccgtcatggcaagtcgttaggctctgggaaaaataaagactggtcacgggtaaaatttggtgctggtcgttatcgtctcttctttcgttatagtgaaaaagagaaagtcatcattctgggatggatgaacgatgaaaacactctgcgcacctacggtaaaaaaacagatgcctataccgtattcagcaaaatgttaaaaagaggacatcctcctgccgactgggaaaccctcacccgagaaacagaagaaacccattgatggtgttcacaatgcccgccgaacgcattcgtgttgaccagcgggcatcctttctcactccccgaccagaatcacttcaaccccagcctttcgcagtccttccaggctatccgcaggaatgccttcatcaacaatgatcatgtcgatacgttgagtatcaatgatcttatgtaaactggaacgattgaacttactggaatcggtgaccacgatgatccgttccgcaacttcgcacatccgacggtttaaacgagcttcatcttcattatgtgtgctgacgccgcgctccagatcgatcgcatctacaccaagaaacagcatatcgaagtggtaattttgcagcgattgctcagcctgatcgccgtaaaaagattgcgactgacggcgcaaatgcccgccggtcatcagcagctcaacgccttccgcttccagcaacgcattagccacgttcataccgttggtcatcgcaattacgtcagtgtgcttgcgcatcagacgagcaatctcaaaagtggtggtcccggaatcgaggataacccgatgacctggctgaatcaactcaacggcagctttcgcaacgctgcgtttcatcgcggtgttcagtgcgcttttatcttccactgatggctcgactgacggcgtcgtgctatcgcagatcaacgcgccaccataggcacgcacagcgatcccctgcttttccagaaacgccagatcgttgcggatcgtcacagtagatacgccatacaatgccgacagatcgttaacctgcacactcccttgctgtcgcagacgctgaatgatctgttctcgtcgctcgctggtgccagtcactcgcttctcacctgaagcgtcggtattactcatagtaagtcctttcgtaaaactttcgtttcatttcgttttgcctattaacgcctttctattaagcaaatgcaagcccaccttgcccattgacgcaagctactctcgtttcagtgactttcattatgtttcttttgtgaatcagatcagaaaaccattatctttcgttttatttttatctcaccatgacgcagtatcaactgaaacaaaacgaaagattaatatcgcagtaatctgaactggagaggaaagtgaaacatctgacagaaatggtgagacagcacaaagcgggcaaaacaaatggaatttatgccgtttgttccgcacatccgctggtgctggaagctgcaatccgctacgccagtgcaaaccaaacgccgttactgattgaagcaacctccaatcaggtagaccagttcggcggttataccggaatgacgcccgccgattttcgcggctttgtttgtcagctcgccgactcgttgaatttcccgcaggatgcgttgattctgggtggtgaccatctggggccaaaccgctggcaaaacctgccggccgctcaggcaatggccaatgccgatgatttgattaaaagctacgttgcggcaggattcaaaaaaatccaccttgattgcagcatgtcctgtcaggacgatccgattcccttaactgatgacatcgtggctgaacgcgccgcccgtctggcgaaagtggcggaagaaacctgtcttgaacactttggcgaagccgatctggagtatgtcattggtaccgaagtgccggtacctggcggcgcgcatgaaaccttaagcgagctggcggtcaccacgccggatgccgcccgcgccacgctggaagcccatcgtcacgcctttgaaaagcaaggtttgaatgccatctggccacgcatcattgccctggtggttcaacccggcgtcgaattcgatcacaccaacgttattgattatcagcccgccaaagcgagcgccttaagccagatggtcgaaaactacgaaacgctgattttcgaagcgcactctaccgattatcaaacgccgcaatcgctgcgccagctggtgattgaccactttgccattctgaaagttggcccagcgctgaccttcgccctgcgtgaagctctgttctctctggcggcgattgaagaagaactggtgccagcgaaagcctgttctggtctgcgtcaggtgctggaagacgtgatgctcgaccgcccggaatactggcaaagccactaccacggtgacggcaacgcgcgtcgtctggcgcgtggttatagctactcggatcgcgtgcgctattactggccggacagccagattgatgacgctttcgctcatctggtacgtaatctggcggattcaccaattccgctgccgctgatcagccagtatctgccgctgcagtacgtgaaagttcgctccggcgagctgcagccaacgccacgggaactcattatcaaccatattcaggacatcctggcgcagtaccacacagcctgtgaaggccaataagcaaaacaaagaggaacacgctatgccaaatattgttttaagccggattgatgaacgcttgattcacggtcaggtcggcgttcaatgggtcggatttgcgggggcaaatctggtgctggtagccaacgatgaggttgccgaagatccggtacaacaaaacctgatggaaatggtactggcagaagggatcgccgtacgtttctggacgctgcaaaaagttatcgacaacattcatcgcgccgccgatcgacagaaaatcctgctggtttgtaaaacacccgccgatttcctgacgctggtgaaaggtggcgttccggtgaatcgcattaacgttggcaatatgcactacgccaatggcaaacaacaaatcgccaaaacggtttctgtggatgcgggcgatatcgcagcatttaacgacctgaaaaccgctggggtggaatgcttcgttcagggcgtcccgacagagcctgctgtggacctctttaaattactttgagggattcatcatggaaatcagcctgttgcaggcatttgcgttgggcattatcgcctttatcgctggcctggatatgtttaacggcctaacccatatgcaccgcccggtggtcctcggcccgttggtcgggctggtacttggcgatctgcataccggaattttaaccggcggtacgctggaactggtgtggatggggctggccccgctggcgggcgcacagccgcctaacgtgattatcggtactatcgtcggcacggcgtttgccattactactggcgtgaaacccgatgtcgcagtaggtgtcgccgtacctttcgctgtcgcagtacagatggggattaccttcctgttctcggtgatgtccggcgtgatgtctcgctgcgacctggcaacaaacccgcgccgcatttgatgctggtgccgacggcctggtgcattgctataacgggatgacaggtttacatcaccgcgaaccgggaatggttggcgcgggattaacggacaagcgcgcctggctggaactgatagccgatggtcatcatgtgcatccggcggcaatgtcgctgtgttgttgctgtgcgaaagagagaatcgtactgatcaccgacgcgatgcaggcagctgggatgccggatggtcgctatacgttatgtggtgaagaagtgcagatgcacggtggcgttgtccgtaccgcgtctggtgggctggcgggcagtacgctgtctgttgatgcggcagtgcgcaatatggtcgagttgacgggcgtaacgcctgcggaagccatccatatggcgtcgctgcatccggcgcgaatgctgggtgttgatggtgttctgggatcgcttaaaccgggcaaacgcgccagcgtcgttgcgctggatagcgggctacatgtgcaacaaatctggattcagggtcaattagcttcgttttgatagtttgctcctttattgggccttcacttcccccgtaaggcctttctttttctttcgttttgatctgtgcagcggtgtcggatgcgacgctaacgcgtcttatccgacctacagttggtgaccgcaaggccggataaagcgtttgcgccgcatccagcaatcccttttgcttcctttatcttttctttcaacgatcacaaatttcgttttatttcttttttctccattgaactttcagtttcttttctatagattttaatcaacgaaagacatcaccaagtgaaatgaaacgaaaggcaagtgaaagcgacaacgcccgacgtcaagttcatcagactaaggattgagttatgccagaaaattacacccctgctgccgccgcaaccggtacatggactgaagaagagatccgccatcagcctcgcgcatggatccgttcactcaccaacatcgacgcgctacgttccgcgctcaataacttccttgaaccgttactgcgcaaagagaatctgcggatcatcctgaccggagccggaacgtcggcatttatcggtgacatcatcgcgccgtggctcgccagccataccggtaaaaacttcagcgccgtaccgaccaccgatctggtcaccaatccgatggactacctgaacccagctcatccgctgctgttgatctccttcggtcgatccggcaacagcccggaaagcgtcgcagccgtggaactggcaaatcaatttgtaccggaatgctatcacctgccgatcacctgcaacgaagcgggcgctctttaccaaaacgcgatcaacagcgataacgcgtttgccctgctgatgcccgcagaaacgcacgatcgcggctttgcgatgaccagcagcattaccaccatgatggccagctgcctcgcggttttcgcacctgagacgatcaacagccaaaccttccgcgacgtggcggatcgttgccaggcgatcctgacctcactgggcgatttcagcgaaggtgtgtttggttacgcaccgtggaaacggatcgtttatctcggtagcggtggcttacagggcgcagcacgcgagtcggcgctgaaagtgctggaactgacggcgggtaaactggcggccttttatgattctccaaccggattccgtcatggaccaaaatcgctggtcgatgacgaaacgctggtggtggtatttgtctccagccacccttacacccgtcagtatgatcttgatctgctggctgaacttcgccgtgacaaccaggcaatgcgtgtaatcgccatcgccgcggaaagcagcgacatcgtcgctgccggtccacatatcatcctgccaccgtcacgtcactttatcgacgttgagcaggcattttgcttcctgatgtacgcccagacgtttgcactgatgcagtcgctgcacatgggcaatacgccggataccccatcagccagtggcaccgttaaccgcgtggtgcaaggcgtaatcattcatccgtggcaggcataagaggatcgcattatgagcattatctccactaaatatctgttacaggacgcccaggccaatggctacgcggtgcctgcttttaacattcataacgccgagacgatccaagcgatcctcgaagtgtgcagtgaaatgcgatcgccggtgatcctcgccggaacgccggggacctttaaacacatcgcgctggaagagatctacgccctgtgtagcgcctattccacaacctacaacatgccactggcgctgcatctcgaccaccacgaatcgctggatgatattcgccgtaaagtccacgcaggtgtgcgcagtgcgatgatcgacggcagccacttcccgtttgccgagaacgtgaagctggtgaaatcggttgttgacttctgccactcacaagattgcagcgtggaagcagaactgggccgcctgggcggtgttgaagatgacatgagcgttgacgccgaaagtgcattcctgaccgatccacaagaagctaaacgctttgtcgaactgactggcgtcgacagcctggcggtagcgattggtacggcgcacggcttatacagcaaaacgccgaagattgatttccagcggctggcggaaattcgtgaagtggtggatgttcctctggtgctgcatggtgccagcgatgttccggatgaatttgtccgtcgcactattgaacttggcgtcacaaaagtgaacgttgccacagaattaaaaatagccttcgctggcgcggttaaagcctggtttgcggaaaatccgcagggtaatgatcctcgttattatatgcgcgtcggaatggatgcgatgaaagaagttgtcagaaataaaattaatgtctgtggttcagcgaatcgaatttcagcataatcattagttttttatgatttatcccaatgtacttcccgattaatatcggggagtgccttaatggaaaaggagataactaaaccttaataaatacatcactacaatatcgcaacaataatatatttaaaaaaattatattattcaactttatggtgaggattacacaatgaccagtccaaatattctcttaacccgtattgataaccgtctggttcacggtcaggttggcgtgacctggacatccaccatcggtgcaaatctgctggtagtcgtggatgatgttgtcgctaacgatgatattcaacagaaattaatgggtattaccgcggaaacctacggctttggcattcgtttctttactatcgaaaaaaccattaacgtcatcggcaaagctgcaccacatcagaagatcttcctgatttgccgtacgccacaaacggtacgtaaattggtagaaggtggtattgacctgaaagatgtcaacgtcggcaatatgcatttctcggaagggaaaaagcaaatcagcagtaaagtttatgtcgatgaccaggatctcacggacttacgttttattaaacaacgtggcgtgaatgttttcattcaggacgtccctggcgatcaaaaagaacaaatccctgactaaatctaaaatcgccttaatattggtttgaggtaataaaaatgcatgaaataaccctacttcagggattatccctggcggcgttagtttttgttctggggattgatttttggctggaagccttatttttattccgcccgataatcgtttgtaccctaactggcgctattctcggtgatattcagactggcttaattaccggtggtctgacagagttggctttcgccggattaacccctgcaggtggtgttcagccgcccaacccgattatggcgggtctgatgaccaccgtcattgcatggtctacgggcgttgatgccaaaacagcaattggtcttggcctgccgtttagtttgttaatgcagtacgtcattctgttcttctattccgctttctcattatttatgaccaaagccgataaatgcgcgaaagaggcggatacggcagcgttttcccggcttaactggacaacgatgctcatcgtcgcttcagcgtatgcggtgattgctttcctctgtacttacctggcacagggggcgatgcaggcgctggtgaaagcgatgcccgcctggctgacccacggctttgaagtggctggcggtattctgcctgccgttggttttggcttgctgctgcgcgtaatgttcaaagcgcaatatatcccttacctgatcgccggtttcctgtttgtttgctacatccaggtcagcaacctgttgccggttgccgtactgggcgcaggctttgcggtgtatgagtttttcaatgcgaaatcccggcagcaagcgcaaccgcagcccgttgccagtaaaaatgaagaagaggactacagcaatgggatctgaaatcagtaaaaaagatatcacccgtctgggctttcgttcgtcgctgctgcaagcgagctttaactacgaaaggatgcaggcgggcggttttacctgggcgatgttgccgatcctgaaaaagatttataaggacgacaaaccgggcttaagcgcggcgatgaaagataacctcgaatttattaatacccacccgaatctggtcggattcctgatggggttattaatttcgatggaagaaaaaggagaaaaccgcgacaccattaaaggcctcaaagtggcactgtttggcccaatcgccgggattggcgatgcgattttctggtttactttgttgccgattatggcgggaatttgctcatcatttgccagccagggaaacctgctggggccgattctatttttcgccgtttacctgcttatctttttcctgcgcgtcggctggacccacgtcggttattcagtcggcgtgaaggcgatcgataaagtgcgagagaactcgcagatgattgcccgttcggcaaccatcctcgggatcacggtaatcggcgggctgatcgcttcgtatgtgcatattaacgtggtgacatcgtttgccatcgacaatacccacagcgttgcgctgcagcaggatttcttcgataaagtcttcccgaacattttaccgatggcctacaccctgctgatgtattacttcctgcgggtgaaaaaagcgcatccggtgctgttaatcggcgtgacttttgtgctctctattgtttgttccgcattcggcattttgtaaatggaacgaggcactgcgtctggtggtgcctctttacttaaggaatttcatcctgtgcaaacccttcagcaagttgaaaactatacggcgttaagtgaacgtgccagcgaatatttattggccgtgatccgtagcaaaccgaatgccgtgatttgcctggcgaccggagccacgccattactgacgtatcattatctggtagaaaaaatccaccagcagcaggttgatgtcagccagctcaccttcgtgaagctcgacgaatgggtggatctgccattaacgatgccaggcacctgcgaaactttcctgcaacagcatatcgtgcagccgctggggctacgtgaagaccagctcatcagctttcgctccgaagagataaatgagacagagtgcgaacgggtaacgaacctgattgcgcgcaaaggcggtctggatttatgcgttctcggattggggaaaaacggtcatcttgggctgaacgaaccgggagaaagcctgcaaccggcctgccatatcagtcaacttgatgccagaacacagcaacatgagatgttaaaaaccgcgggtcgccccgtgactcgtgggatcaccttaggcctgaaggatattctcaatgcccgcgaagttttgttactggtgactggcgaaggaaagcaggatgcgacagatcgttttctcacggctaaagtctctaccgctatcccggcttcatttttatggctgcacagtaactttatttgtttaattaacacctaaccagatgaaaaatttgctcaaaatgtttaaattaacttatgtaacagtcacgcattatattaaataacatttgactgggttgaacataacgccgatagcaaaaggagttatgttcaacaatttaattttagatatacatataacttgttctattaataaatcacctcgtattctgactcgccccctggcgcagcaaagtcaggcatttatactcttttgaatacatagaaaattgatatcaatataatgaaaatatcaaatatttgcatataaatataatcttaaagttcagtctatttaatgttcaatgaaatatttctgcctgtataatctttaaagatgttgaacatatattcacattaaatatgattatgtacttgttacaaggataaggttatatatgaataaagttacaaaaacagctattgcgggcttacttgcgcttttcgcaggtaatgccgctgcaaccgatggtgaaatagtttttgatggcgagattttaaaatccgcttgtgaaatcaatgactctgataagaaaattgaagttgctcttggtcactataatgccgaacagtttcgtaatattggcgagcgtagcccaaaaattccattcactattcctttagttaactgcccaatgactgggtgggagcacgataacggcaacgttgaagcgtctttccgtctatggctggaaacgcgagataatggcaccgtccctaacttccctaatctggcaaaagtaggctcttttgctggcatagcggcaacaggtgtgggtatccgtattgacgatgcggaaagcggaaacattatgccactgaatgctatgggcaatgataacacggtttatcagatcccggcggaatccaatggtattgtcaatgttgacctcatcgcttactacgtatcaaccgtagttccatcagaaatcaccccaggggaagcagacgctatcgttaacgtaacgctggattaccgttaatacgttagggcgttatctgacctgtcagataacgcccttttccttcctctttctcgttgtatcaggttgaaaaataactatgtcaaaacgaacattcgcggtgatattaaccttgttgtgtagcttctgtattggccaggcgcttgcaggaggaatcgttttacagcgaacgcgagtgatctatgatgccagccgcaaagaggctgcgttacctgtcgcaaacaaaggcgcagaaacgccttatttactgcaatcatgggtagataatatagatggtaaaagccgtgccccatttattataaccccaccgctatttcgtcttgaggctggcgatgactcatcactgcgaattattaaaacagctgataacctgcctgaaaataaagagtcgctgttctacattaatgttcgtgccattccagcaaagaaaaaatcagatgatgttaatgctaacgagttgacgctggtatttaaaacacggatcaaaatgttttatcgccccgcacacctgaagggacgggtaaacgatgcgtggaaatcactggaatttaaacgtagtgaccattcactcaatatatataacccaactgaatattacgtcgtatttgccggactggcagtcgataaaaccgatctcacaagcaaaattgaatatatcgcgcccggagaacataaacagttaccacttcctgcatctggcggaaagaacgtgaaatgggctgcgatcaatgattatggcggcagttccgggacagaaactcgtccactgcaataaaaaatataaaaacacaggtcatcagggaatgccacaacgacaccaccagggacataaacgcacaccgaaacagttggcgctcatcatcaaacgttgtttgccgatggtgctcactggcagcggcatgctttgcactaccgctaacgccgaagagtattatttcgaccccattatgctggaaaccacaaaaagtggtatgcaaacaaccgatctgtcgcgtttttcaaaaaaatatgcacaactaccaggaacttatcaggttgatatctggctgaataaaaagaaggtttcacagaaaaaaattacatttaccgccaatgcagagcaacttctgcagccacagtttacggtagaacaactacgtgagctgggtattaaggtggatgaaatcccggcgctggctgaaaaagatgacgatagcgtgatcaactcgcttgaacaaatcattcccggtacagctgctgaatttgatttcaatcatcagcaacttaatttgagcattccccaaattgcactgtaccgtgatgcaagaggttacgtctccccttctcgttgggacgatggtataccaacgctgtttaccaactactcgtttacaggttctgataaccgttaccgccagggcaatcgtagccaacgacagtacctgaatatgcaaaatggtgctaattttggcccctggcgattacgcaactattccacatggacacgcaacgatcagacatcaagctggaataccatcagtagttatttacaacgtgatatcaaggcgttgaagtctcagttgcttctgggagaaagcgccaccagcggcagtattttttccagctacacctttactggcgtgcaactcgcttccgacgataatatgttgccaaacagccagcgcggatttgccccaacggtacgcggtatcgcaaacagtagtgcaatcgtgactatcaggcaaaatggttatgtgatctatcaaagcaacgtgtcagcgggtgcctttgaaattaacgatctctacccctcttccaacagcggcgatttagaagtcacgattgaagaaagtgacggtacacaacgtcgctttatccagccttattcttcattacccatgatgcagcgacctgggcatctaaagtatagcgcgaccgctggacgctatcgcgctgatgcaaacagtgatagcaaggaacccgaatttgctgaagccacggcaatatatggtttgaataatacttttacgctgtatggcggcctgctcggttctgaagattattatgcgctggggatcggtatcggcggcacacttggcgcactgggcgcgttgtcgatggatatcaacagagctgacacccaattcgataaccagcactcttttcatggctatcaatggcgtacgcagtacatcaaagatatcccggaaaccaacaccaatatcgctgtcagctactatcgctataccaacgatggctattttagttttaatgaagccaatacccgcaattgggactataacagtcgccaaaaaagtgaaattcaattcaacatcagccagacaatatttgatggggtaagtctgtatgcctccggttcgcagcaagactattggggcaataacgataaaaacaggaatatctctgttggggtttccggccagcaatggggagttggttacagcctgaattatcaatacagccgctacactgatcaaaataatgaccgcgcactctctttgaatctcagtattccgttagaacgctggttaccgcgtagccgggtttcctatcagatgaccagccagaaagatcgcccaacccaacatgaaatgcgtcttgatggctcactgctggatgatggtcgcctgagctatagcctggaacaaagtctggatgacgataacaaccataacagtagcctgaacgccagttaccgttcaccttatggcaccttcagtgccggatacagctacggtaatgacagcagccaatacaattacggcgttaccggcggcgtggttatccatcctcatggcgtgacgctctcgcaatatctgggcaacgcttttgcgcttatcgatgctaacggagcatctggcgtgaggatacaaaactatccggggattgctaccgatccttttggctatgcagtggttccttatctcacaacttatcaggaaaaccgtctctcggtagatactacgcagctgcccgataacgtcgatcttgaacaaacaacacagtttgtggtgcccaacagaggtgcaatggtagcggcgcgtttcaacgccaatatcggttatcgcgtacttgttacagtcagcgatcgcaacggtaaaccgttgccctttggcgctcttgccagcaacgatgatacggggcaacaaagtatcgtcgatgagggcggcatactatatctctctgggatatcgagtaaatcacaaagctggactgtacgctggggaaatcaggcagatcaacaatgtcagtttgctttcagtacaccggattcagaacctacaacctctgtattacaaggcacagcgcagtgccattaaggataaaaaaatgaaaagagcgcctcttataacaggtcttttgttgatatccacatcctgcgcttatgcctcctcaggagggtgtggagccgacagcactagcggtgcgacaaattacagcagtgtggttgatgatgttacggtgaaccagacagataacgtgacaggacgggagtttacctctgcaacgctaagtagcactaactggcaatacgcctgttcctgctctgcgggtaaggcagttaaacttgtctatatggtcagccccgtacttaccaccactggacatcagacaggatattacaaactcaatgacagcctggatattaaaaccacattacaggcaaacgacattccaggactcacaaccgaccaggttgtctctgttaacacccgattcacacagataaaaaacaacacggtatattctgctgcaacccaaacgggtgtttgccagggtgatacgtctcgttatggacccgttaatattggtgcgaacaccacctttaccctgtatgtcaccaagccatttctcggctcgatgaccattccgaaaacggatattgccgtcattaaaggcgcgtgggtcgatggaatgggaagcccgtctacaggtgacttccatgatttagtcaagttatcgattcagggaaatctcaccgccccacagtcgtgcaaaattaatcagggcgatgttattaaggttaattttggattcatcaatggtcagaagtttaccacccgcaatgccatgccagacggttttactccagtagactttgatatcacttatgactgtggtgatacttcaaagattaaaaactcgttgcaaatgcgcatcgacggtacaactggggtagtagaccagtacaacctggtcgccaggcgaagaagttcagacaatgtgcccgatgtcggtattcgtattgaaaatctcggcggcggagttgcaaatattccttttcagaacggtatccttcccgttgatccttccgggcatggcaccgtcaatatgcgcgcctggccagttaatctggtcggtggtgagctggaaacaggaaaatttcagggcacagccaccattaccgtcatcgtgcggtaaaagaagacgttgcgttttgattaacgcaacgcttcggcactgttacccctgctgctccagcgcatacttatacagcgcatttttcttcacgccgtgaatttctgcggccagcgccgccgcttttttcagcggcagttctgcctgtagcagcgccagcgtgcgcagggcatcggcgggtaagtcttcttcctgtgctttatgaccttcgacaatcagcaccatttcgcctttgcgacggttttcatcttcctttacccacgccagcagctcgccaacgggcgcgccgtgaatggtttcccaggttttggtcagctcacgcgccagaaccacgtagcgggattcgcctaataccgcaacgatatcttccaggctatctaacagacggtgggtagattcataaaaaatcagcgtgcgcggctccgcttcaatggcttttagcgcatcacggcggccttttgatttggcaggtaaaaagccttcgtaacagaaacggtcagagggtaaacccgctgcgcttaacgcagtgatagcagcacacggcccgggtagcggcaccacgcggatccccgcttcacggcaggtacgcaccagatggtagccaggatcgttaattagcggcgttccggcatcggaaaccagcgcaatgttttgcccctcttgcagcttcgccagcagcgtttcagctttttgttgttcgttatggtcgtgcagcgcaaacaaccgggcattaatcccaaaatgttgcagcaataaaccggtgtgacgagtatcctcggcggcaatcagatcaacggcctgtaatacctctaacgcacgctgggtgatatccgccagattgccgattggcgtcggtacaatgtaaagctggccctgagaattatccgccgattggtgttgtttcattgtgtcgtccgtattgccgatttaatattgagcattgcgtaaaaaaaatatcactggatacattatggtaccctcaacattttctcgtttgaaagccgcgcgttgtctgcctgttgttctggcagccctgattttcgccggttgtggcacccatactcccgatcagtccactgcttatatgcagggcacggcgcaggctgattctgccttttatcttcagcagatgcagcaaagctctgatgataccaggatcaactggcaattactcgccattcgtgcactggtgaaagaaggtaaaaccgggcaggcggttgagttgtttaaccaactaccgcaagaactgaacgatgctcagcgtcgcgagaaaacactgctggcggtagagattaaactggcgcagaaagattttgctggcgcgcaaaacttgctggcgaaaatcacacctgccgatttagaacaaaaccagcaagcgcgttactggcaggcaaaaatcgatgccagccaggggcgtccttccattgatttactgcgcgcgttaattgctcaggaaccgctgcttggcgcgaaagaaaaacagcagaatattgatgccacctggcaggcgctctcctccatgactcaggaacaggcgaatacgctggtgatcaacgccgacgaaaatattctgcaaggctggctggatctgcagcgcgtctggtttgataaccgtaacgatcccgacatgatgaaagccgggatcgccgactggcagaaacgttatccgaacaatccgggcgcgaaaatgctgccaacgcagttggttaacgtaaaagcgtttaaaccagcctcgaccaacaaaatcgccctgctgttgccactgaatggccaggcagcggtatttggtcgcactattcagcaaggctttgaagcggcgaaaaatatcggcactcagccagtggcagctcaggtagctgccgcacctgccgcagacgtagctgaacaacctcagccgcaaaccgtggatggcgttgccagcccggcacaagcctcggttagcgatctgaccggtgaacagcctgcagcccagccggtgcctgtaagcgccccggcgacaagcaccgcagcggtaagcgcacccgcaaatccatccgcagagctgaaaatctacgatacctcatcacaaccacttagccagatcttaagccaggttcagcaggatggcgcgagtattgtggtcggtccgttgctgaaaaataacgttgaagagttgctgaagagcaacactccgctgaacgtactggcactgaaccagccggagaatatcgaaaatcgcgtcaatatttgttacttcgcgctttcaccggaagacgaagcgcgcgatgcagcgcgtcatattcgtgaccagggtaaacaagcgccgctggtgctgatcccacgcagttcattgggcgatcgcgtagccaatgcgtttgcgcaagagtggcagaaactgggcggcggcaccgttctgcaacaaaaatttggttccaccagcgaattacgcgcgggtgttaacggcggttctggtattgctttaacgggtagcccgattactctcagagcgacaaccgactccggcatgacgaccaacaatccaacgctgcaaaccacgccaaccgatgaccagttcaccaataatggcggtcgtgtcgatgcggtgtacattgtggcaacgccgggtgaaatcgcttttatcaaaccgatgatcgccatgcgtaacggtagccagagcggtgcaacgctgtacgccagctcccgcagtgcgcaagggaccgctggcccggatttccgactggagatggaaggcttgcagtacagcgaaatcccgatgctggcaggcggtaatctaccgttaatgcagcaggcactcagcgcggtgaataacgattattcactggctcgcatgtatgcgatgggcgtcgatgcctggtcgctggcaaatcatttctcacaaatgcgccaggttcagggttttgaaatcaacggtaataccggaagcctgacggctaacccggattgcgtgattaacaggaacttatcatggctacagtaccaacaaggtcaggtagtccccgtcagttaaccaccaaacagaccggcgatgcgtgggaagcacaagcgcgtcgctggctggaaggcaaaggactgcggtttatcgccgctaacgtgaacgagcgtggcggcgagatcgatctgataatgcgtgaaggccggaccaccatttttgtcgaggtacgctatcgccgctctgcgctttatggcggcgcggcagccagtgtgacccgcagcaaacaacacaaattattacagactgcccgcttgtggctcgcgcgtcataatgggagttttgatactgtggattgccggttcgatgtggtagccttcaccgggaatgaggttgagtggattaaggatgcctttaatgaccactcataattaaggtttaaggattagcgtgcaagaaagaattaaagcttgcttcactgaaagcattcaaactcaaattgcggcggcagaggcgcttccggatgccatctcccgtgcagccatgacgctggttcagtctctgctcaatggcaacaaaatcctctgttgtggtaatggaacttccgctgccaatgcacagcattttgctgccagcatgatcaaccgtttcgaaacggagcggcccagcttacctgccattgcactaaatactgataatgttgtcttaacggcgattgccaacgatcgcttacatgatgaagtgtatgcaaaacaggtgcgggcgctgggtcatgcgggagatgtattgttagccatttccacccgtggcaacagccgcgatattgttaaagcagttgaagccgccgttacgcgtgatatgaccattgtggcattgaccggctatgacggcggcgaacttgcaggtttgttagggccacaggatgtggagatccgcattccttcgcatcgtagtgctcgcattcaggaaatgcatatgctgacggtaaattgcctgtgcgatctgatcgataacacgcttttccctcaccaggatgattaaggagaatacatgaaggcattatcgccaatcgcagtccttatttccgcgctgctgttgcaaggttgtgttgccgctgccgtagtgggtaccgctgctgtgggtaccaaagccgcaactgacccacgcagtgtcggcacccaggtggacgatggtaccctggaagtgcgcgtgaacagcgcattgtcgaaagacgaacagattaagaaagaagcgcgcattaatgtaacggcctatcagggcaaagtgctgctggttgggcagtcaccaaatgctgaactttcggctcgcgccaaacagattgctatgggcgtagacggtgccaacgaagtgtataacgagattcgtcagggccagccgattggtctgggcgaagcatctaacgatacgtggatcaccaccaaagtgcgttcgcagctcttaaccagcgacctggtgaaatcgtccaacgtgaaagtgaccaccgaaaacggtgaagtgttcctgatggggctggtgactgaacgtgaagcgaaagcggcggcagatattgccagccgggtgagcggcgtgaagcgggtaactacggcgtttacgtttattaaatagcagccccttgtaatgcctgatgcgacgcttgccgcgtcttatcaggcctacaacgatacaaaccgtaggtcagataaggcgtttacgccgcatccgacatgttttccctcaaatcagaacaacagcgccagcccgccgacaatcacaccagacactgccaccatcgcccctgtcagccataaggctttcgccgggaacgctttgcgcagcataatcagtgacggcaaactcactgccgggagcgtcatcaacaatgccagcgccggagcggttcccatacctgccagcatcatcgtttgtacaatcggaatttctgctgccgtgggaatgacaaacaagcatcctgctaccgccatcgccaccacccacatcaggctgttatcgacagcaccatcggcatgggggaataaccagacgcgagcggcacccaacaccagtactgcaaggatgtaaaccgggatcgtactccagaaaagcgtccatagcgccctgccccagcggctaaaaaacccgccctgtgcttccggtatgtcaatttcgaccggtgcctgcgtttgcggtgtttcacgcacccatttttgcaccagcgtcgcaatcagcaacaccatcaccagcccggccaccagacgaatcgccgcaaaaccccagccgaggacaaagcccataaacaccagcgtcgccgggtttaacaccggattgcccatccagaatgccagcgcaccgcccatcgacacctgttggcgacgcattcccgccgcgaccggagccgcacagcaggtacacatcatgcccggcaacgaaaacagcgttcccagcagcgtgccgcgaaagcgcgattgcccaagcgtacgcaacaaccagtcacgcgggatcagcacctgaatcaacgaaccgaggatcacccccagcaccgccgctttccataccgcgaggaaatagatcatcgcgtaatccaacgccgcctgccatgggttagcatccgcctgcgcaaggatagatttaccgatactgtgggtttcggcagcagtaaacgctttgccgtagtaaggttcccatttcacataccagagaccggcaatgacaacgagaaagaaaagcgcgggtttccaccactgaatgggcgttgccgcctgagatgaagactgaccagtcatagcattccccaggaataagttatgataattgagcgcgtgaatattacgctcactatcaattcttgggaataattattcagctcttttgcgtaattctgaagagcttaaaatcgtcacgccttcatgctcaggccgcatcgactctgccagcatgacccgcgccacgtctctcgcatcaatggatttccagttacctggtaacaaacggaacagcggcgcaaaaagcgtttcgttcatccgctgtttgctacgatcgcccagtaacatcgacgggcgagcaatggtcaatttcggccagttctgggcgattaatgcttcttccatctcccctttgacgcggttatagaaaaacggcgagtgggcattggcacccatcgcactgactaccaacatatgctgcgcgcccagtcgccgcccggttaatgcggtatccactaccagcgtgtaatcggcatgaataaacgcctctttgctccccgcttctcgccgcgtggtgccgagacaacaaaacacaatgtcgatgggatcggtgacctgcgccaacgcgtcactcagttgcggatcatggggattaaacaccccgggcatatcgcccaacggacgtcgcgtcggcgcagcaatggcgttaactttcggttcgttaatcaacatccgcagcaggtgaccgcccaccagccccgttgcgcctgtaatcagtacctgactcatcttcgctcctttacagaattgtctgccttgcgctccacggctcatgcaccaggcttaatagaccatgaggtaattatccccgattgtgggaaattcgcctcatccaatgcaacaacgcggaggaagcatgagtaagaaaattgccgttttaatcactgatgaatttgaggattcagaatttacttcacccgcagacgagttccgtaaagccggacacgaagtgattaccattgaaaaacaagcgggtaaaacggtgaaaggcaaaaaaggagaagccagcgtgaccatcgataaatccatcgatgaagtgacgcctgcggagtttgatgccctgctgctaccgggcggccattcaccggattatctgcgtggggacaaccgttttgtcacctttacccgtgattttgtgaatagtggcaaaccggtgtttgccatctgtcacggcccgcagttgctgatcagcgccgatgtgattcgggggcgcaaactgaccgcagttaaaccgatcattattgatgttaaaaatgcgggcgcggaattttacgatcaggaagtcgtggttgataaagatcagctggttaccagccggacaccggacgatctgccagcgtttaaccgcgaggcgttacgcctgctcggtgcctgagtcgcgtagccaaatcatttttttaccaaagcccagcgtgttgtcggtgaatttgatttcatcgagccggatttcccacaccggggccgacagcattctggcaaccggaaagcgacgattgtacgccttgcgcgcgaggtcgctttcctcaccttccagcctgcggatctcacctttaaactgcacaccgcgaattaacgctaccgttttcggctgaccgtttaccgttccggcaaccgcagcctgcggcccactcatctgcgcgtggcgcgttttttcttccgtcaaaatgtagaaggcgactttctgcgcatcaaaaagataaaaggcattagcgcaccagagttccccttcctgctgcacacaccaagtgacaacatgttgttttgccagccaacggctgatggcgatgagtgtttccattgctgttctcttttatactgtgggcctgaccttaacatgcgacgcagacgatgacaccctggtttctttacttgatccgtaccgccgacaataagctttataccgggatcaccacggatgtcgaacgccgctatcagcagcaccaaagcggcaaaggggcgaaagcactgcgcgggaaaggagaactaacgctggtgttttccgcgccagtgggcgatcgttcgctggcgttacgggcggaatatcgcgttaagcaactgaccaaacggcaaaaagagcgtctggtagcggaaggcgcagggtttgcagagctgttaagcagtctgcaaaccccggagattaaaagcgattgaaatgctcgtgatactcaaccaggccggtaacgccattcagcgcgtcatccgctaaacgatgtacctggaaggcgctttcagtgcccggccagcggcaacgcagatcgtgatgcgccgccagttcaaagccgaaacgactgtacagcgccggatcgcccagcgtcaccactgcggcatagccgaactcattaagcgaatcgagtccttcatagaccagttggcgtgccagcccctgtccacggtatttttcatcaaccgccaacggtgccatgccgacccattgcaggtcttcgccctgcacatcaaccggactaaatgccacatagccaatgacctgaccttcgtcatctgtcgccaccagccccagcgtcagaaagccatcttcacgcagatcgtgaaccagcttcgcttccgcatcactttcgaatgagcgacgcagcagggcatcaatacccggcgcatcaatgggaatttctactcgaattagcatggttcacctaccgatgtctgtttggtttcaggcgcggttttcattcccgcctcaacaaaatccgccagttgcagcagcatcatgcgtaaggctttcggcatttgctccagttcaatggcgtccatcaggtttttcacatacagccccagctccgtatcgccttcaatcaccagccgacgctggaagaagagcgtatccggatcttgtttacgcgccgcaatcatcagcagatcgctggcgtcggcactaaaactcacatcagcttgcgcgttctggctaacgaccagtttgccattcaccaccgaggtaaaccattgcaggtcaatatcacgcacatgaatacttaaccagcggccttcaagaaactccagctcgccatcatccagcgcctggcggaattgccagcttaagacctgctcaagaacctggcgttttagcgcaaatggcgtcagttttaccggtacactcaacagagatggccccaaatgcacaatacgggaacgcagtttatccaacacgagttttactccctgtttcaacaatcatcctattttgccatatcagaaaaataacatagcggtataaatcaacaattccatatgaaattgctgctaccaccaatacaactttaactgccttaaatcaaaaattgtcgcagcaaggttaactaaaatcccagttcgttaacatttttgcgttttgatagcgcaaccttcaggaaaaattatggagctgctctgccctgccggaaatctcccggcgcttaaggcggccatcgaaaacggcgcagatgctgtttatatcgggctaaaagatgataccaatgcccgtcacttcgccggccttaactttaccgagaaaaaattgcaggaagcggtgagttttgtccatcaacatcgccgcaaacttcacatcgcgattaacacttttgcgcatccggacggttacgcccgttggcagcgcgccgtggatatggcggcgcagctgggtgccgacgcgctgatcctcgccgacctcgccatgctggagtacgccgccgagcgttatccgcatattgagcgccacgtatcggtgcaggcttcggcgaccaatgaagaggcgattaacttttatcatcgccattttgacgttgctcgcgtggtgctgccgcgcgtgttgtcgattcatcaggtgaaacaactggcacgggtcacacctgtaccactggaagtctttgctttcggcagcctgtgcattatgtcggaaggtcgttgctatctgtcgtcgtatctgacgggtgagtcgcccaacaccataggcgcgtgttctccggcccgtttcgtgcgctggcaacaaacgccgcaggggctggaatcccgcctgaacgaagtgctgatcgaccgttatcaggacggcgaaaacgcaggttatccgacgctatgtaaagggcgttatctggtggacggcgagcgctatcacgcgctggaagaaccaaccagtctcaataccctggaactgctgccggagttaatggcggcgaatattgcttcggtgaaaattgaaggccgccagcgtagcccggcgtatgtcagccaggtggcgaaagtctggcgtcaggctatcgaccgttgtaaggccgatccgcaaaactttgtaccgcaaagcgcgtggatggagacgctcgggtcgatgtccgaaggcacgcaaaccactcttggcgcatatcaccgtaaatggcagtgagaaaagcaatgaaatattccttagggccagtgctgtggtactggccaaaagagacgctggaagaattttatcagcaggccgccaccagcagcgccgacgtgatttatcttggtgaagcggtatgcagcaagcgtcgggcaaccaaagttggcgactggctggagatggcaaaatcgctcgccgggagtggtaagcagattgtgctctccacgctggcgctggtgcaggcatcatctgaactgggcgaactgaaacgctatgttgagaacggtgagtttctgattgaagccagcgatctcggcgtggtgaatatgtgcgctgaacgcaaactgccgttcgtcgccgggcacgcgctgaactgctacaacgcggtgacactgaaaatattgctcaaacagggcatgatgcgctggtgtatgccagtggagctttcccgcgactggctggtgaatctgcttaatcagtgcgatgagctgggcattcgtaaccagtttgaagtggaagtcctgagctacggtcatctgccgctggcctactccgcccgctgctttaccgcgcgttcggaagaccgcccgaaagatgagtgtgaaacctgctgcattaagtatccgaacgggcgcaacgtgctgtcgcaggaaaaccaacaagtgtttgtactcaatggcattcagaccatgagcggctacgtttacaacctcggtaacgagctggcatccatgcagggcctggttgatgtggtccgcctgtcaccgcagggtactgacactttcgcgatgctcgacgccttccgcgctaatgaaaatggcgctgcaccactgccgttgacggcgaacagcgactgtaacggctactggcggcggctggcaggactggagctgcaagcctaagtaaatagctcactttgttaacaactttaactactctttaatgcagtattaaagattaatcggtaacaaagtgagctgttatgactgataaaaccattgcgttttcgctactcgatctggcccccattcccgaaggttcttcagcgcgagaagcattctcccactctctcgatctcgcccgtctggctgaaaagcgcggctatcatcgctactggctggcagaacaccacaatatgactggcattgccagtgctgccacgtcggtattgatcggctatctggcggcgaataccaccacgctgcatctggggtctggcggcgtgatgttgcctaaccactcaccgttggtcattgcagaacagttcggcacgcttaatacactctatccggggcgaatcgatttggggctgggtcgtgctccgggtagtgaccaacggacaatgatggcgctacgtcgtcatatgagcggcgatattgataatttcccccgcgatgtggcggagctggtggactggtttgacgcccgcgatcccaatccgcatgtgcgcccggtaccaggctatggcgagaaaatccccgtgtggttgttaggctccagcctttacagcgcgcaactggcggcgcagcttggtctgccgtttgcgtttgcctcacacttcgcgccggatatgctgttccaggcgctgcatctttatcgcagcaacttcaaaccgtcagcacggctggaaaaaccatacgcgatggtgtgcatcaatattatcgccgccgacagcaaccgcgacgctgaatttctgtttacctcaatgcagcaagcctttgtgaagctgcgccgtggcgaaaccgggcaactgccgccgccgattcaaaatatggatcagttctggtcaccgtctgagcagtatggcgtgcagcaggcgctgagtatgtcgttggtaggtgataaagcgaaagtgcgtcatggcttgcagtcgatcctgcgcgaaaccgacgccgatgagattatggtcaacgggcagattttcgaccaccaggcgcggctgcattcgtttgagctggcgatggatgttaaggaagagttgttgggatagtgtgtcttaacgcgggaagccttatccgagctggcaacgctgtcctacatagacctgataagcgaagcgcatcaggcattgtgtaggcagcagaaatgtcggataaggcaccgctgattactgatacaccggcagtaaattaaagctcgataaaatatgcaccagtgcgttgccgacgccaaacaccagaatcagcgcaatcatcggcttgccaccccagacgcggaatttcgggctgccaaagcgtttacgcgatgcacgggctaacagcgccggaacaattgccgcccagatggtagccgctaaaccagcataaccaatggcgtacaggaatccgttcgggaacaacagcccccccacaactggcggggcaaaggtcagcaatgccgttttcaagcggcccacagccgagtcgtcgaaaccaaacagatctgccagatagtcaaacaaacccagcgttacgccgaggaacgaactcgctaccgcaaagtttgagaacacgaccagcagcagatccagactacggctgttcagtacgccgcttaacgcctgtaccagcacatcaatattaccgcccttctctgcaataccgataaactccggacgcgggatgttacccatcgtcgccagcaaccagatggtatacagcgccagcgccatcagcgtaccgtacaccagacatttcacgatggttttcggatctttgccgtaatacttcatcaggcttggcacgttaccgtgataaccaaacgatgccagacagaacggcagggtcatcaacagatacggtgcataagacgcattgctttcggcgacgttgaacaatgtcgcaggctgcacatgccccagcaggctaccaaaggtgaggaagaaggtaatgactttcgcccccagcacaatcgctgtcatgcgactgacggctttagtgctcaaccacaccacaaacgctaccagcaatgcaaaaccaaaacccgccgcccgtgccgggacgtttagtgacatctctgcgaaggtgtgatgcagaatcgaaccactggcagaaatataggcataggtcaggatatagagcacaaaggcaatggaaatgccgttgaccacgttccagcctttgcccagcaaatctttggtgatggtgtcaaaactcgaaccgattctgtaattcaggttagcttccagaatcatcaagccggaatgcagcatacagaaccaggtaaagatcagcgccgccattgaccagaaaaaccacgccccggacatgaccactggcagagaaaacatccctgcgccaataatggtgccgccgataatcaccacgccgccaagcagcgacggtgacgtttgggtggtggttagtgttgccatgagggcttctctccagtgaaaaatagtgcgactgcgttgttatgcattgcactgtaccagtacacgagtacaaaagacagaaaaaaagccccgatggtaaaaatcggggctgtatatattattttacagattgtgttcgctgttcagcgatgattacgcatcaccaccgaaacgacgacgaccggtagaatcatcacgacgcggagcgcggccttcacgacgttcgccgctaaaacgacgaccatcaccacggccaccttcacggcgttcaccgctgaagttacgaccgccttcacgacgttcgccaccgaaaccacgaccaccgccacgacgctcaccgccagtatgcggctgtgcatcgcccagtaactgcatgttcatcggcttgttgagaatgcgagtgcgcgtaaagtgttgcagcacttcacccggcatacctttcggcagttcgatggtggagtgagaagcaaacagcttgatgttaccaatgtaacggctgctgatgtcgccttcgttagcaatcgcaccaacgatatgacgaacttcaacaccatcatcgcggcccacttcaatgcggtacagctgcatatcgccaacatcacgacgttcacgacgcggacgatcttcacggtcaccacgcgggccacggtcgttacgatcgcgcggaccacggtcatcacggtcacggaattcacgtttcggacgcatcggcgcatctggcggtacgatcagagtacgttcaccctgtgccattttcagcagtgccgcagccagagtttcgagatccagctcttcaccttcagcagtcggctgaattttgctcagcagtgcgcggtattgatccagatcgctgctttccagctgctgctgtactttagcggcgaatttttccagacggcgtttgcctagcagttctgcgttcggcagttctacttccggaatagtcagcttcatagtacgttcaatgttgcgcagcagacgacgctcgcggttctcaacgaacagcagcgcgcggccagcacgacccgcacgaccggtacgaccgatacggtgaacgtaagactcagaatccatcgggatatcgtagttaactaccaggctgatacgctcaacgtccaggccacgggctgcaacgtcggtcgcaatcaggatgtccagacgaccatctttcaggcgttccagtgtctgttcacgcagcgcctggttcatgtcaccgttcagcgcggcgctgttgtagccgttacgctcaagagcttcagccacttccagagtcgcgtttttggtacgaacgaagataatcgccgcatcaaaatcttccgcttccaggaaacgtaccagtgcttcgtttttgcgcataccccagacagtccagtagctctggctgatgtcaggacgggtagtcacgctggactgaatgcgcacttcctgcggctctttcataaagcggcgggtaatgcgacgaatcgcttccggcatggttgcagagaacagagcggtctgatgaccttccgggatctgcgccataatggtttcaacgtcttcgatgaagcccatgcgcagcatttcgtcagcttcatccagaaccagaccgctcagtttagagaggtccagagtgccacgtttcaggtggtccagcagacggcccggagtaccgacaacgatctgcggcccctgacgcagggcgcgtaattgcacgtcataacgctggccgccgtacagagcaaccacatttacgccgcgcatgtgtttagagaaatccgtcattgcttcagcaacctgtaccgccagttcgcgggtcggtgccagcaccagaatctgtggtgctttcagctcaggatcaagattctgcaacagaggtaaagagaatgctgcagtttttccgctccccgtctgggccatacccagaacgtcgcggccattcagcagatgtggaatacactctgcctgaattggagatggtttttcgtaacccagatcgttaagggcttcaaggataggagccttcaggcccagatctgcaaaagtggtttcgaattcagccatgtagtacgtgtgcctcaaaattaatggcggccagtctacataactcatcatgaaattgatcagcaattttcattgaaaagtgtgaaccggctcaaagtaggtgtattaacgaacaacaacgccctcacccgttaaggtgatggcaatcaaaaaagattacgggctgatgtgtacgtcagctattgctggtccgattctgccaggtcatcttggtcctggcccaggagcgataattccaacaatgcgtatcggtgctcaacaaagttatgaacgttgttggcaaccgccagtttgaacagtgccgtggcgctgtccaaatcccccagacttaggtagtacttacctaaatagaagttggtttcactgagatgctcagcgagcgaggtgttatccgttgcgtccgccttgagcctttccattaacgtttgttcgctaatgttgcccaggtagaactcgacaatgttccatccccactgttccttatccgatttttcgaagtgctgtttcaacacttctttagcctgcttctcatcgagcttctgctcggcgagataaagccacagactacggaaaggatcattgggatcgtcttgataaaacgccagcagatcatcttgcgctaacttgtcacgaccgccgtaatataatgcgatcccgcgattcaagtgcgcgtagttgtaagttggatcaagctcaagtacagaatcaaacgcttcataggcagcatcaaaattgcctgcctgcgttaaatatatgcctaagtaattgaatacttcaggcatatccggtcggattgccagcgcttgcgaaaaatcgttacgcgctaatgccctcagaccgagactatcatacaacactccgcgctcatataaaagctgtgcgcgttcgtcatcggttaaagcccgactggcaaggatttgttccatacgtgccagaatcacttcctgctgtaaagtcggttgcaatggtaccgcgaggacttcacttttacgccaggaagtattactgcatcctgcaagcgtaagtgctgtcgcaacgaaacaccagcgcaaaaaaggcttcatttcccactcccgaagaccacggttgaatgaacgtcctgttcccggttgctaacaaggcgtcctgcccggttaaaagccccccgccgcagcggagggcaaatggcaaccttactcgccctgttcagcagccggagcttccggtgctgcagcaggttgagactgctcagtcgcttctttaatgctcagacggatacggccctggcgatcaacttccagaactttcaccggtacttcctgacccatctgcaggtaatcggtcactttctcaacgcgtttgtcagcgatttgagagatgtggaccagaccttctttaccgccgccgatggcaacaaatgcgccaaagtcaacgatacgggtcactttaccagtgtagacgcggcccacttcgatttctgcagtgatctcttcgatacgacgaatagcatgtttcgctttctcgccgtcggtcgctgcaatcttcacagtaccgtcatcttcgatttcgatggtggtgccagtttcttcggtcagagcacggattacagaaccgcctttaccgataacatctttgatcttgtccgggttgatcttgatggtatggatacgcggtgcgaactcagagatatcgccacgcggcgcgttgatcgcctgttccattacgcccaggatatgcagacgcgcacctttagcctggttcagcgcaacctgcatgatctctttggtgataccttcaattttgatatccatctgcagtgcagagataccgtcgcgggaacctgcaactttgaagtccatatcgcccaggtgatcttcgtcgcccaaaatgtcagacagtacaacgtagttgtcgccttctttcaccagacccattgcgatacccgcaacggcagctttgatcggcacacctgcgtccatcagcgccagagacgcgccgcacacggaagccatagaagaggaaccgttggattcagtgatttcagacacaacacgtacggtgtacgggaatttgtccatatccggcatgactgccagcacgccgcgcttcgccagacgaccgtgaccaatttcacgacgcttcggagaaccgaccatgccggtttcgcctacggagtacggagggaagttgtagtggaacaggaaggtatcggtacgttcgcccatcagttcatcaagaacctgcgcgtcacgagcagtacccagcgttgcggtaaccagcgcctgcgtttcaccacgggtgaacagcgcagaaccgtgagtacgcggcagcacgccagtacgcacatccagaccacggatcatatctttttcacgaccgtcgatacgcggttcgcctgccagtacgcggctacgaacaacgtttttctcgatcgcgtgcagaatttcacccagttcgttttcgtccagggtttcgtcttcagcaagcagcgtcgcgatggtttcagatttgatgacatcaacctgcgcataacgctcttgtttgtcggtgatgcggtaagcatcgctcaggcgagcttcagccagtgcagcaacgcgcgcgtttagcgcttcgtttaccggctccggctgccagtcccaacgcggtttaccggcttctttcaccagttcattgatgttctgaataacaacctgctgttgttcatgaccgaacactactgcgcccagcatctggtcttcgctcagcagttgagcttcagattcaaccatcagtacagcggcttcagtaccggcaacaaccagatccagtttgctctctttcagctcgtcctgagtcgggttcagtacgtactggtcattgatgtaacctacgcgggcagcaccaatcgggccattgaacggaataccagacagagacagcgctgcggaagcaccaatcatcgcgacgatatccgggttaacttgcgggttaacagaaaccacggtggcgataacctgaacttcgttgacgaagccttccgggaacagcgggcgaatcgggcggtcaatcagacgcgcgatcagggtttcgccttcgcttgggcggccttcacgacggaagaagctacccgggatacgaccagcagcgtaggtacgctcctgatagttaacggtcagtgggaagaagtcctgacctggtttggcttttttctggccaacaacggtaacgaataccgcggtgtcatccatgctaaccataacagcggcagtagcctgacgagccatcatgccggtttccagagtcacggtgtgttggccgtactggaatttacgaacgatcggattaagcaatgtaatatcctttctctttcttagacagtaccttacggcactggtgttaatacccgatcttctgcgcatcctcgcgactaatgacaaccctaacccagctctatgtgggtaaagcctctcattagccgcgcgaacctctgcaacggaagatcattcatagcaacaatacattagtttccagtgaattgctgccgtcagcttgaaaaaaggggccactcaggcccccttttctgaaactcgcaagaattagcgacgcagacccaggcgctcgatgagctgggtgtaacgtgctacgtctttacgtttcaggtagtcgagcagtttacgacgctgagaaaccatgcgcagcagaccacgacggctgtggtgatcttttttgtgctctgcaaagtggccctgcaggtggttgatctgtgcagtcagcagtgctacctgaacttcggtagaaccggtgtcgtttgcgtcacgaccaaactcagaaacgattttagctgttgcttcagtacttagagacattttaaaactccaaagtatatagaatgaaaggacgccgatctctaattcagcgatcccagtgtacgttacgcaaagtgttaaacaatttacgcgacgttaagcggcagtattctactcgtagcgacctgttatcgcaagacggttaacattacgccgggtattcaaccaccaggcgacgaggcgcaacgcggccttcatcgtcaatttcgcccataccgataaatttgccgttctcaccttccgtgacgcgaaccagtccttccagtggcgcaccagatgtacgaaccgggttaccatttttgaagtaaacagaagacgttaacggaagattcaccaccggatagtccgaagctggactgtccattggcatcagtaatggatcaagtaactccgcggctggaatatcctgctgttcagcttgctcaacaagttcacgcaggtgctccagggtcaccatccgttcaaccggatatttacttaccgccagacggcgcaggtaaataacatgcgcgccacagccgagtttttcacccaggtcatcaatgatggtgcggatataagtgccttttgagcagtgaatttccagctccagctcattgccttcatggcgaataaacagcaattcataaacggtaatcggacgcgcttcacgcggaacttcaatgccctgacgcgcatattcgtacagttttttgccctgatatttcagtgctgaatacatcgaagggatctgttcgatatcgccacggaaagtatccagtgccgctgccagctgctctgcgctaaaggttaccggacgttcttcaacgatctgtccgtcggcatcagaagtatcggtacgctgtccaagacgcgcaatgacccgatagcgtttgtcggagtccagcagatactgggaaaacttcgtcgcttccccgaggcaaatcggcaacatgccggtcgccagcgggtccagcgcaccggtatgcccggcacggttggcgttatatatacgtttcactttttgcagcgcatcgttgctggacataccctgaggtttatccagcaacaaaacgccgttaatgtcgcgaccgcgacgacgaggacgactcattagtcctccttgctgtcgtccgggttaacacgacgttcttcgtcatgtttgaccacgctggtcaccaggtttgacatgcgcatcccttcaaccagagagttgtcgtagaagaaggtcagttccggcacgatacgcaggcgcatcgctttccccagcaggctgcggatgaaaccagaagcttcttgcaacgctttgatgcccgctttaaccgcgtcttcatctttgtcgttgaggaacgtcacatatactttggcatacgccaggtcgcgagacatttcgacaccggaaacggtggtcatcatgcccaggcgaggatctttaatttcacgctgcaggatgagagcgatctctttttgcatttcctgcgctacgcgctgcgggcgaccaaattctttcgccataataaattctcctgacaaaaaaggggctgttagcccctttttaaaattaatttcaggtggaagggctgttcacgttgacctgataagacgcgccagcgtcacatcaggcaatccatgccggatgcagcgtaaacgccttatcccgcatggaaccctaaaaaccttaagcaatggtacgttggatctcgatgatttcgaatacttcgatcacatcgccagtgcggacgtcgttgtagttcttaacgccgataccacattccataccgttacggacttcgttaacgtcatctttgaagcggcgcagggactccagctcgccttcgtagataaccacgttgtcacgcagaacgcggatcgggttgtgacgtttaaccacaccttcggtaaccatacagcctgcgatggcaccaaatttcggcgatttgaacacgtcacgaacttccgccagaccgataatctgctgtttcagttccggagacagcataccgctcatcgccgctttcacttcgtcaatcaggttatagatgacggagtagtaacgcagatccaggctttccgcttcaatcactttacgtgcagaggcatcagcacgtacgttaaagccaaccaggatggcgttggacgccgcagccagggtggcgtcggtttcggtgataccacctacgccagaaccgatgatcttcactttaacttcgtcagtagacagtttcagcaaggagtcggagatcgcttcgacagaaccctgtacgtctgccttcaggacgatattcacttcgtgaacttcgccttcggtcatgttggcgaacatgttctcgagtttagatttctgctgacgcgccagtttaacttcgcggaatttaccctgacgatagagtgcaacttcacgcgctttcttctcgtcacgtacaacggtaacttcatcacccgcagccggtacgccggacaggccgaggatttccaccggaatggacggacccgcttccagcacttcctgacccagttcgttacgcatcgcacgaacacgaccgtattcgaagccacacagaacgatatcgcccttgtgcagagtaccttcacgtaccagaacggtagcaaccggaccacgacctttatcgaggaaggattcgataaccgcaccgctcgccatacctttacgtaccgctttcagctccagaacttccgcctgcagcaggatagcgtccagcagttcatcgataccggtacccgctttcgcagatacgtgtacgaactggctttcaccgccccactcttccggcaggatgccgtactgggagagttcgttcttaacgcgatccggatcagcttctggtttatcgatcttgttcactgcaaccaccaccggtacctgcgccgctttcgcgtgctggattgcttcgatggtctgcggcatcacaccgtcgtcggcagcaacaaccaggactacgatgtccgttgcctgcgcaccacgagcacgcattgaagtaaacgcggcgtgccccggggtgtccaggaaggtgatcatgccgttttcagtttcaacgtggtatgcaccaatgtgctgggtaatgccgcccgcttcgccagaggccactttcgttgaacgaatgtagtccagcagagaggttttaccgtggtcaacgtgacccatgatggtcacaaccggcgcgcgcggttcagccgcagcacccgtgtcacggtcgctcattaccgcctcttccagctcgttttcacgacgcaggataactttatggcccatctcttcagcaaccagctgtgcggtttcctgatcgataacctggttgatggttgccattgcgcccagtttcatcatcgctttgatgacctgagagcctttaaccgccatcttgttcgccagttcgccaacggtgatagtttcgccgatcacaacgtcacggttaacggcctgagcaggcttctggaagccttgctgcagcgaagaacctttacgttttccgcctttaccgccacgtactgctgcgcgtgcttcttcacgatcagcttttgattcagcgtgtttgttgcctttcttcggacgcgctgctttcgcgttacgaccacggccacggccgccttcgacttcacgatcgctttcgtcttctgcctggcgagcatgttgagaagtagtgacgtgataatcgctggaatcttcagtcggttccgcgttatcagtccatttgttttcttccgccatacgacgtgcttcttcagcaacgcgacgtgcttcttcttcgagtttacgacgcgcttcttcttcagctttacgcttgagctctgcagcttcctgctcacggcgggctttttcagcctgggcgtttttagtcatatcgtcttgttgattgctcactttgtctttttccgcagcttcacgtttcgcttgttcagcagcttcacgcttagcttgttctgcggcctcacgttcagctttttgttgcgcctcgcgtttagccgattcttctgcctcacgacgggcttgctcttccgcttcacgctgcgcttgctcttccgctgcaaggcgttcagcctcttgcggatcgcgtttcacaaaggtgcgtttcttgcggacttcgatttgtaccgatttgctttttccaccggtaccaggaatgttaagggtgctgcgtgttttacgttgcagcgtcaatttgtccgggcctgaatttttctgattcaggtggtcaatcaaagtctgtttctcttgtgcagacacagagtcgtcagcagacttccggatacctgcatcagcaaattgctgtaccaggcgttccacggaggtctgtcgctctgcggccagcgttttaatcgttacatctgtcatgctgttccttcctgctacagtttattacgcttcgtcaccgaaccagcaaatattacgggcagccataatcagtgctccggctttttcgtcggtcaacccttcgatatcagccagatcatcaatgccctgttcggcgagatcttccagcgtacaaacgccacgggcggccagtttgaatgccaaatcacgatctaccccttcaaggttcagcagatcgtcagccggtttgttatcaccgaggctttcttcctgggcctgtgcaatggtggccagtgcatttttagcacgctcgcgcagtgcttcaacggtcggctcatcaaggccttcgatttccaacagctctttcatcggcacataggccaattcttccagcgtcgagaagccttcttctaccagaacagtcgcgaagtcttcgtcgatgtcgagatatttggtgaaggtgtcgatcgctgcgtgcgcttccgcctgatgcttagcctgcaggtcgtcaacggtcatcacgttgagttcccaaccgctcagctgcgaagccagacgcacgttctgaccgttacggccaatcgcctgcgccaggttaccggcttcaacggcgatatccatggtgtgtttatcttcatccaccacgatagaagcaacgtctgccggtgccattgcgttaatcacgaactgcgccgggttatcatcccacaggacgatatcgatacgctcgccacccagttcagtagacaccgcctgaacacgcgcgccacgcatacctacgcaagcacctaccggatcgatacgtttatcgttggttttcaccgcgattttcgcacgagaacccggatcgcgagccgctgctttaatttcaatcacttcttcgccgatttctggcacttcaatacggaacagttcgatcagcatttccggcttggaacgagtgacgaacagttgcgcgccacgcgcttccgggcgaacggaatagagcacgccacgaacgcggtcgccagggcggaagttttcacgcggcagcatatcttcgcgcaggatcacggcttcagcgttgttgcccagatccagagagatgttgtcgcggtttacttttttcaccacgccggtgatgatttcaccttcgtgttcacggaactgatcaaccaccatcgcacgttcggcttcacgcactttctgcacgataacctgttttgccgtctgggtagtgatacggtcaaaggtaacagactcaatctgatcttcaacgtaatcgcccaggttcaggctttcatcttcataacgtgcggcttcaagggtgatttccttggtcggctgggtgacttcatcaacaactaaccagcgacggaaagtgtcaaaatcaccgcttttgcgatcgatctgtacgcggacgtcgatctcttgttcatattttttctttgttgctgtcgccagcgcgctttccaatgcttcgaaaatcttctcgcgaggtagcgccttttcattggatacggcttcaactacagccaaaatttctttgttcatcgcgggcttttcacctcatccagactattaaaagtggggaaccaggttcgccttctggatattactcagcgcgaacacttcatctttaccttcgacggtaactgtgatcatttcaccgtctaccgctttgataacgccctgccatttacgacggttttgtaccgccatacggagaaccagagtcacctcttctccgacaaaacgggcgtagtgttcagccgtgaacagtgggcgatcgagacccggtgaggagacttccaggttataagcaacggtgatgggatcttcaacatccagcacagcacttacctggtggctcacatcagcacaatcatcaacattgatgccatcttcactatcaatatagatgcgcagtgtggatgtgcgaccgcgaataaattcgatgccaaccagttcaaaacccagggcctcaactggcgcagtaatcatctctgttaatttttgctctaatgtggacaagcccacccccaagacataaaaaaagggcctaaagcccagttattctgtagtcagataacaaaaaaccccgataaatcggggctttatataactgaaccctataaccgcaactgcggtctggagcactttccagaaggattttttcaaatcccactacgaaggccgaagtcttcacagtatatttgaaaaaggactctaagggaaagtggttgcgggggccggatttgaaccgacgatcttcgggttatgagcccgacgagctaccaggctgctccaccccgcgcctgaaacgtggcaaattctactcgttttgggtaaaaaatgcaaatactgctgggatttggtgtaccgagacgggacgtaaaatctgcaggcattatagtgatccacgccacattttgtcaacgtttattgctaatcatgtgaatgaatatccagttcactttcatttgttgaatacttttgccttctcctgctctcccttaagcgcattattttacaaaaaacacactaaactcttcctgtctccgataaaagatgattaaatgaaaactcatttattttgcataaaaattcagtgagagcggaaatccaggctcatcatcagttaattaagcagggtgttattttatgacgacgattctcaagcatctcccggtaggtcaacgtattggtatcgctttttctggcggtctggacaccagtgccgcactgctgtggatgcgacaaaagggagcggttccttatgcatatactgcaaacctgggccagccagacgaagaggattatgatgcgatccctcgtcgtgccatggaatacggcgcggagaacgcacgtctgatcgactgccgcaaacaactggtggccgaaggtattgccgctattcagtgtggcgcatttcataacaccaccggcggcctgacctatttcaacacgacgccgctgggccgcgccgtgactggtaccatgctggttgctgcgatgaaagaagatggcgtgaatatctggggtgacggtagcacctacaaaggaaacgatatcgaacgtttctatcgttatggtctgctgaccaatgctgaactgcagatttacaaaccgtggcttgatactgactttattgatgaactgggcggccgtcatgagatgtctgaatttatgattgcctgcggtttcgactacaaaatgtctgtcgaaaaagcctactccacagactccaacatgcttggtgcaacgcatgaagcgaaggatctggaatacctcaactccagcgtcaaaatcgtcaacccgattatgggcgtgaaattctgggatgagagcgtgaagatcccggcagaagaagtcacagtacgctttgaacaaggtcatccggtggcgctgaacggtaaaacctttagcgacgacgtagaaatgatgctggaagctaaccgcatcggcggtcgtcacggcctgggcatgagcgaccagattgaaaaccgtatcatcgaagcgaaaagccgtggtatttacgaagctccggggatggcactgctgcacattgcgtatgaacgcctgttgaccggtattcacaacgaagacaccattgagcagtatcacgcgcatggtcgtcagttgggccgtctgctgtaccaggggcgttggtttgactcccaggcgctgatgctgcgtgactctctgcaacgctgggttgccagccagatcactggtgaagttaccctggagctgcgccgtgggaacgattattcaatcctgaataccgtctcagagaacctgacctacaagccagagcgtctgacgatggaaaaaggcgactcggtgttctcgccagatgatcgtattggtcaattgaccatgcgtaacctggatatcactgatacccgcgagaaacttttcggttatgccaaaactggcctgctttcctcctctgccgcttcaggcgtgccgcaggtggagaatctggaaaacaaaggccagtaattcgacatcaaccctgcccttcaggggtggggttaccttgcttatcctctgtaaactcctttctgagcatcacataatcgaaaacatcatggtttgcatccacaacccgtgagtctcctttatagtgtgcaatcacttcctcaagcgtttgcggctgttccggctttgttacccccatccacgcattaataaggtaattattgtaagctgtcgaaaagatgttgttttccgttgtgcgatccacgccatccccaagaacggggctataccagataaacatcgggacatgatatgcctgctggctagcctccctgcctccatgaaaatagacgttcttcttcgtagggtcacgttccaggccgtggtcggcaaaatacatgaccgaggcgcggcgatcttttaataattcaaaaacctgacctagcaaactatctgtgtaatgaatggagttgtcatagcaggcatcctgatcgtcctgcggttgaaacacggcgctggattgcggataggcgctacaagccggttcatggcttccatttaaatgaagaacaatcagtttcttttgctgcgtattttgctgtaatgcttgcgataaatgcggcaacaacaattcatcaaatcctctgacataaactgtttccatggcgcgcatggcgatactggtaactgctgtaccattctgccgaaaagcggattgcgagcttagccagaaagtctgaaatcctgcttgattagccatattaataatgttgtcggggtaattatgaatgtcatgactcaaaacagaatcagcagttaaagaaaggggaaccgacagcgcagtgtaaggtgcgccgcttattgcttgattaaacagtttgatctgttttctttgtgcttcaacttgcggtgtcgtagagcgtgtatatccatacaaagacatattgtcgacacgtacagactcccccacaatcaacacgtaggtatcaatacctgtatccctgactgataattgaaaatacggcaccgtgtttgcaattgagagtaatctttgatgctctttcgctgctaaagcaaaatagttgagattgaaaaacggcgtataggtagcaaatcgcgacgctagtatatatggactgaacgcttttttattttttgcatctttataagcaaattgacaagcggaaaataaactgcccgaaatgacaatcagcaataatattcctgtcactttttttgtcggcaaggaaacatcatattttattattactgccaaaaaaagaagggataaaaaagcaaaggcacatagataagggatatacatccccagcattttgacaacttcatccggatcactctggagcacactaatcgcaaatccatcattgaaagttgtaccaaaggtacaccatgaatagaggctaatactcatgtctgccgcagtcagtaacacaaatggtgcggcaacaagcaggcgaagcggaagggatgatatacgttttacaaccaggatggtcagaacgaagaacagcaagcgctgaaccatatgcgctccggaagaagcgactaagttcgtaataccaaaaacaataacacaaagatacaacaaccaatgagatttaaaagttctagcaaatttgttgaatactgtcatccagaaatccaagttcacaaccaatataaacaattatcaacaatgtttaattttatatcagacatgtttttcaactctgatccatatcagaacgaaacactgttagttttttctttttaaatgatgcggccattgcgttctcagtaattaaataacattatcaatgcgtctctaaacattacgcagaacgtagccatcagtcgttatactgacaggagcaggatggtttatcgagaagtaaacatatccgtattcgtaccggaactggagttgacacaataaagtgccaattatgtcagtagaagggaaaaatttataactaaggcgtaccggcaccatcgtttcaaggtaccagctacgagtaaagcaactggacgagatacagatacctgacaaccattcctcagaccaggaccaaaacgaaaaaagacgcttttcagcgtctcttttctggaatttggtaccgaggacgggacttgaacccgtaagccctattgggcactaccacctcaaggtagcgtgtctaccaattccaccacctcggcacggatactactttttagttcgggatatcgctggtcggcttagccggagcagctggctgagtttgttcggttttcgccggtgcactcagattttcccattcgctacctttattggttttgttgctattgatgttacccagcaccagactgatgatgaagaataacgttgccagcagcgccgtcatgcgggtcatgaagttaccagaaccacttgaaccaaacagcgtagcggaagcgcctgctccgaaggaggctcccatatcagcgcctttaccttgctgcagcatgatcagaccaacaaggccaattgccacaataaggaaaactactaaaagagcttcatacataatcaacctgttccttgcggagttgccgcgtaccaatgcttcaaccaataaagcgggagtttttaatctttcccactgaagcgggtgtgaatactaaccaaagcgaatgaccttcgcaagggcaattttatcgcattgtatcaactgcggaaaaaaacagcaaaaccgatgtgttcgctgagaaaaaaggcgacaatcgccgcctttttagccagttatctaacgctttaaacggcttttactgcatcggcgatgcggtgtgcaaattcagtcacctgcgcttcgtcttcgccttccaccatcacgcgaattaacggttcggtgccggatttacgcagcaacacgcgtccacggttgcccagcgcagcttcaacctctgcggtcacggctttaactgactcatgctcaagtggatcgccgctacctgcggtgtaacgtacgttaaccagaatctgcgggaacattttcatgccgctgcaaaggtcgtgcaggctcatatggttacgtgccatcgccgccagcacctgcaagccagcaacgatgccgtcaccggtagtagttttatccagcaggatcacatgaccggaattctctgcaccgatacgccagcctttctcctgcattttttccagtacgtagcggtcacccactttcgcgcgcgcaaatggaattcctaactgtttcagcgccagttcaagccccatgttgctcatcaatgtacccacagcgccaccacgcagctggccctgacgaagaccttcacgcgcgatgatatacatgatctgatcgccatcgactttattgccttcatggtcaaccataatcacgcgatcgccatcgccgtcgaaggcaataccgagatccgctttttcagccagcacacgagcctggagcgcgcgaacgtcggtagcccccacttcggcattgatgtttacaccgtttggctcacaaccgatagcgataacgttcgcccccagttcgcgcagcacgttcggcgcgatgtgataagtcgcaccgtttgcacaatccaccacaatcttcagttcactgaggctaagttcgttcgggaacgtggctttgcaaaactcgatatagcgacccgcggcatcaacgatacggctggctttacccagttctgccgaatcaacgcagctgatctccttttccatttccgcttcgatggcctcttctaccgcatccggcagtttggtgccgtcgatagagaagaatttaatgccattatcgtagaacgggttatgcgatgcagatatcacaattccggcctctgcgcggaaggtacgcgtcagataagccacggccggtgttggcatcgggccagtgaagagtgcggaaaggcccgctgccgccagacccgcttccagtgctgactccagcatatagccagaaatacgcgtgtctttaccaataataatcttacgggagccgtggcgcgccagcactttacccgcggcccaacccagcttaagcacaaaatcaggtgtgatcggcgcatcccctacacgaccacgaatcccatcggtaccgaaatatttacgattactcatagcgtttgttttcctttgcagacagagtggcttccaccacccgcatcgcttctacggtttctttgacgtcatgaacacgaatgatgtgcgcgccttgcattgcggcaatgaccgcacaggccagactaccgctcaggcgctcggacggccccacgttcagcagctgcccaatcatcgattttcgtgacatacccaccaacagcggcaggttgaaatggtgaaattcagccaggcgcgccagtaatgaatagttatgggagagatttttaccgaaaccgaatccggggtcgagcaacaatttctcttttgcgatacccgcctgctcgcaacgtgctatttgctcaataaagtagcgattcacttctgcaaagacatcgtcatacttcggagcttcctgcatggtttttggatttccctgcatatgcatcagacaaaccggtaaaccggtttctgcagccgcctccagagcgccaggttcggaaagggagcggatatcattaataatgtgagcgccaactttcgctgactcacggatgacttctggtttggatgtatcgactgagatccagacttcgaagcgttgagcaattgcctcaaccacaggaataacacgttgcaactcttcttcaacgctaacttccgccgcccctgggcgcgtggactcgccaccaacgtcaatgatcgtcgcgccagcgttgatcatcagattcgcatgtttcaccgcatctatcagcgagttatgcgtgccaccatccgaaaaggaatcaggcgtgacgttgaggatccccattacgtgaggatggctaaggtccagtgaagtaccctgggcaaagagtttcatgatgttatccctggtatgaattgataagaaaaaaccccggagcacgccccggggttttcggtacaaatacagtcatctgatgcgggaacttacttgtcgcctaactgctctgacatggtgttacccgggttcggcgtacgcggttcatcaaccggacgaggagcctttggactaccattgtcgccagaattgttagaagcgcctggttcttcccagcccgctggcggacgtacatcgcgacgtgccatcaggtcatcaatctgcggtgcgtcgatagtctcatatttcatgagagcatctttcatcgcatgcagaatatccatattgtcggtcagaagctgacgcgcacgattatagttacgctcaatcagtgctttcacttcctggtcgatgatacgtgcagtttcatcggacatatgtttcgctttcgctacgctacggccgaggaacacttcaccttcttcttccgcgtacagcagtggacccaatttctcagagaagccccactgagtcaccatgttacgtgccaggttggtcgcaactttaatatcgttggacgcaccggtagatacatgttccggcccgtagatgatctcttctgccagacgaccaccgtacagcgtagaaatctggctttccagtttctgacggctggcgctgattgcgtcgccctcaggcaagaagaaagtcacacccagcgcacgaccgcgtgggataatcgtcactttgtgcaccggatcgtgttccggcaccaggcgaccgataatcgcatgacccgcttcgtggtaagccgtcgattctttctgcgcttccgtcatcaccatggagcgacgttccgcacccatcatgattttgtctttcgctttctcgaactcaaccatcgacacaacgcgtttgttgccacgagcagcgaacagtgccgcttcgttcaccaggttcgccaggtcagcaccggagaaaccaggagtaccacgggcaatgattgccgcgtcgatatcgggtgccaatggtacgcgacgcatgtgaactttcaggatctgctcacgaccgcgaacatctggcaagccgaccacaacctgacggtcgaaacggccaggacgcagcagggccgggtcgagaacgtccggacggttagtcgcggcgataacgatgataccttcgttaccttcgaagccatccatctcaaccagcatctggttcagagtctgttcacgttcatcgtgaccaccgcccagaccagcgccacgctggcggcctacggcgtcgatttcatcgataaagatgatgcacggtgccgctttcttcgcctgttcgaacatgtcacgaacacgggatgcacccacaccgacgaacatttctacgaagtcagaaccggagatagtaaagaacggaactttcgcttcgcctgcaatcgctttcgccagcagcgttttaccggtacccggaggaccgaccatcaagacgcctttcgggatcttaccgccgagtttctggaagcggctcggctcgcgcagatactcaaccagttcagcaacttcttcttttgcttcgtcgcagcccgcaacgtcagcaaaggtcgttttgatctgatcttccgtcagcatgcgcgctttgctcttaccaaacgacatggcacctttgccaccgccgccctgcatttgacgcatgaagaagatccagacaccaatcagcaacagcatcgggaaccaggagatgaagatagaagccagcaggcttggttcttcaggcggttcaccgacaaccttgacgttcttggtcaacaggttatccagtaatttcggatcctgaaccggaatgtaagtggtataacggttactatctttcttggtaacgttgatttcacgtccgttgatacgcgcttcacgaacctggtcgttattgacctcttgtaggaaggtagagtaatccaccttacggccattagactcgctgggcccaaagctctggaatactgacatcagcacaacggcaatgaccagccagagtattaggtttttcgccatgtcactcaagggattaacctcttattacaactgtgttaaaaacagcgtcaggatactctatatccagcatctttcaaactttcgtctgaaatctcccggttagggtttacgcccggtcgctacaatatacacttcccgcgaacgtgcacgagaagagtccggcttacgaactttgaccttcgtaaacagggagcgaatttcccttagatactcatcgaaaccttcgccctggaacaccttcactacaaaactgccacctggcgctaatacatcacgacacatttctagcgccagttccaccagatacatggcacgggggatatccaccgccggtgttccgctcatgtttggtgccatatcggacatgacaacctggactttgctgtcgccaacgcgctccagcagtgctttcatcaccagttcatcacgaaaatcgccctgaagaaagtccacaccaacgataggatccataggtaaaagatcgcaagcgatgatgcggcctttgccgccaatttgggtgaccacatattgtgaccaaccacccggagcagcaccaaggtcgacaaccgtcattcccggtttaaagagtttgtcactttgctgtatttcatcaagtttaaaccaggcacgggaacgtaacccctttttctgtgcctgttgaacatatttatcgctaaagtgttcctgaagccagcggctggagctggcagaacgcttcttacctgtcatttaactttcccatggggataactcatcgtaaccaattgcgtaaatttttacgcgcctatttggtgatatatgggagatggcggtagaatgacccgttttcaatcccaacgtaagcaaaaaatacgatgaatctgagtactaaacaaaaacagcacctgaaaggtctggcacatccgctcaagccagttgttctgcttggcagtaatggtttgaccgaaggggtgctggccgagattgaacaagcgttagagcaccatgaactcatcaaggtgaaaatcgccaccgaagatcgcgaaactaaaaccttgatcgtggaagctatcgtgcgcgaaaccggcgcctgtaatgtacaggtcatcggtaaaacgctggtgctttatcgcccaactaaagaacgtaaaatctcgctgccacgctaagattatcctaaagttacacacatttgctgtgtaaaacgaggggttttccgcaggcaggagagcaaaatgccacgctctgttcgttgataaaaggccgcatagcggcctttttcctttctttacaatacatcaacatcttgagtattgggtaattcttacaggtattccaccttaattacttcaaattctacttcgccgcccggcgttttgatgaccacaacatcatcttcttctttgccgatcaggccacgagcaataggcgagtttacagaaatcaggttttgtttaaagtcagcttcgtcatcgccaacgatgcgataagtctgttcttcgtcagaatccagattcagcaccgttacggtagcaccaaaaataacgcgcccattgttgggcattttggtgacatcaatcacctgcgcgttcgacagcttggcttcgatgtctttaatacggccttcgcagaaaccctgctgttcacgagctgcgtggtattcggcgttttctttcaggtcgccatgctcacgcgcttccgcgatagcagcaatgatttcaggacggcgcacagatttcagaaaatccagctcttcgcgtaatttttcagcgccgcgtaaggtcatcggaatagcttgcatttgttatacctcttgaatattcctgatagggcaagtcttcacccaccccggctgttcggcctgcccggcataactccttaccgggaccagaagcaaaaaaataccgacccgggtacaagtcccaggtcagctacaattcacattttgatagtcattttaccctgaagttcccgaagggtcatcgtttactttatagggcgttgcgccgtagtatgacggctcgattccaggttgttagcgcgagattatgcgattttccagatttatcatcggattgaccagctgtatagcgttcagtgttcaggccgcaaatgttgatgagtacattactcaactccccgctggtgccaaccttgccctgatggtgcaaaaagtcggcgcgtcggcccccgctattgattaccacagtcagcagatggcgctgcctgccagtacccagaaagtgattactgcgctggcggcgttgattcaactcggccccgattttcgttttaccacgacgcttgaaaccaaaggcaatgtggaaaacggcgtacttaagggtgacttagtggcgcgatttggtgccgatccgacgttaaaacgtcaggatattcgcaatatggtcgcgactttgaaaaaatctggcgtcaaccaaatcgatggcaatgtgttgatagatacctccattttcgccagccacgataaagcccccggctggccatggaatgacatgacacaatgctttagcgctccgcctgccgccgccatagttgaccgcaactgtttctccgtctcgctctacagtgccccaaagcctggtgatatggcttttatacgcgtggcatcttattaccccgttacgatgttcagccaggtacgcaccctcccccgtggttctgccgaagcgcaatactgcgaactggatgtggtgccaggcgacctgaaccgctttacgctgacgggatgcctgccacaacgttctgagccgctcccgttggcttttgccgtgcaggatggagccagctatgccggtgcaattctgaaagatgagttaaaacaggcgggtatcacctggagcggaacactgctgcgccagactcaggttaacgaacctggaacggtagttgccagtaaacagtcggccccgctgcacgatctgcttaagattatgctgaaaaagtcggacaacatgatcgccgatacggttttccgcatgataggccatgcgcgcttcaatgtgcctggaacatggcgggccgggtcggacgccgtgcgtcagatcctgcgccagcaagccggtgtcgatattggaaacaccattattgccgatggttcagggctttcgcggcataacctgattgcccccgccaccatgatgcaggtgctgcaatacattgcccaacacgacaatgaacttaactttatctccatgctgccgctggcgggctatgacggctctttgcagtaccgtgcaggtctgcatcaggcgggcgtggatggaaaagtctcagcgaaaaccggttcgttgcagggggtatataacctggcgggattcattaccacagcgagcgggcaacgaatggcgtttgtgcaatatctttctggctatgcagtagaacctgcggatcagcgtaatcgccgtattccgttagtgcgttttgaaagccgtttgtataaagatatttatcagaacaattagtcaaaaagaaaccccggcacatggccggggcttcagattattgacaaagtgcgctttgtttatgccggatgcggcgtaaacgccttatccggcctacaaaatcgtgcaaattcaacatattgcaattctcttgtaggcctgataagcgtagcgcatcaggctgatttggcgtttatcatcagtgattaacgcttgtaaatgaactcaacgccttcttcgtcgtcttcgtcccagtcgtcatcccagtcttcatcatcctcttcagcaatctcttcaagctgctggcgatgataatcatcccacatgaattcgactttctctggctgtttcgcttcttcagcctgcacgaccgggttttcaatgataaaggtcatcacatcccagcagagatctttcacgcccagtccactcgccgcagagatcagataatatttatcttcccagcccagcgcctcagcgatcgctttcgctttctcttcggcttctaccttatccagcagatcgatcttgttgaacactaaccaacgcggtttcgtcgccagatcctggctgtatttttccagctcgctgataataatacgcgcgttttcaaccggatcggtgccgtcaatcggatcgatatcgatgaggtgcaacaggacgcggcaacgttccaggtgcttcaggaagcgaatgcccagacctgcgccttccgcagcgccttcaatcagtcctggaatatcggcaacaacgaagctcttttcgttgtccattcgtaccacacccagacttggcaccagagtggtaaacggataatccgccactttcggtttagccgccgataccgcacgaataaaggtcgatttacccgcgtttggcatccccaacataccgacgtcagccagcagcatcagctccagcagcagctcgcgcttatcgcccggcgtgccgttggttttctgccgcggtgtacggttaacggacgatttgaaacgggtattgcccagaccgtgccagccgcccttagcaaccagcagacgctgaccgtgtttggtcatatcgcccatggtttcaccagtaccctggtcgattacacgcgtacctaccggcactttaatcgtcacgtctttaccgcgcttaccggtacagtcgcggcttgcgccattctgaccgcgctctgcacggaaagatttttcaaaacgataatcgataagcgtgttcaggttctcgtcggcttccatccatacgtcaccaccatcaccgccgtcgccgccatccgggccgcctttcggaatatacttttcgcggcggaagctcacgcaaccattaccgccatcacctgcaacgaccagaatcgatgcttcatcaacaaacttcattttattctccgtaaatcattcgcctgcgcggggttgcgataccaccgttgtatgcttacgtaatccgccccaaatacgatgaccaatggcggaatacatcgcgcccgcaaccacgacaaacgcaccgagataacctaaaaggtttaacatcggtctggcgaagaaatcgggccaggccagtgataaaagatctgaaaaaaacagcgtaaacagtggggtgagcgtgatgatcgcgctcacctgcgctgcctgccagcgagccatcgcttccgccagggcgccatatcctaccaaggtattcagtccgcaaaaaattaaacatgcgagctgccagtggctaagctgcgctatcactccaggctttgccagagggaagagcgcaattgtacataaagtgtacagtaaaaacaggatctgcggtgaggccagccgacgcaataaaaccttttgcgccacgccataactcacccaaaccgtcgccgcaccgaccccaaagataactccccaggtgtaatcggtgagctttgtaaatatctcgaccagactggtgttaaaaaacatcaccaggccgctcaggagcatcaatgcccctacaacctgagtgctgcgcattttctctttgaggataaatacgctggcaaccatcatgccaactggcgagagttgcccaatcacctgcgaagcggtcggactcaggtattgcaaggatgagctgaacaggatgaagttcccaaacagcccggcggtcgccactgccaacaaaatcaaccagcgtggcttacgaaacacgcgtaatggcggcaacctcttcttcaccgcaagaatggcacccaggccaatactcgccatcaagaaacggtaaaacacgattgtcggaggttccatcacctccagcacctgcttcattgcgattggcaacgccccccagcaaattgctgtggtgagcgccaaaagaatgccaatgcctgcctgctgcttcataccgtattccctgcaaagcgcatttgcggattaacgtcgcaccatgcgcatttttaccggttatcgaatgtaaaaagccccgcaacgtgttgcggggctttcatccgttaccgggacgcgaaaaacttattcagcttcgatgctgataaatttacggtttttcgggcctttaacttcgaatttcactttaccgtctgctttagcaaacagagtgtggtcacgaccgcaacctacgttagcgccagcgtggaatttggtaccacgttgacgaacgatgatgctacccgccagaacggattcgccaccgaaacgcttaacgcccaggcgtttagcttctgaatcgcgaccgttacgtgtggagccgccagcctttttatgtgccatttgaaatctctcctcaggtcttaggcgctgatgccagtaattttcacatcagtgaaccactgacgatggccctgctgcttacgatagtgtttacgacgacgaaacttaacgattttaactttctcgccacgaccgtgagcaacaacttcagctttgattacgccgccatcaacgaaaggaacgccgattttgacttcttcaccgtttgcgatcatcagcacttcagcgaactcaacagtttcgccagttgcgatgtccagcttttccaggcgaacggtctgaccttcgcttactcggtgttgtttaccaccactttggaaaaccgcgtacatataaaactccgcttccgcgcacaccttttcaatgattcagagtgcgctataaatattcacaatagggcgcgaatattacgcaaaacgcacgcctttgacaagtgctacagtcaatacacgaagaaaaaaaacacaacttgtacggtaacgtttatctgtgccattttttcagtacaatcaccctatattcctaaccataaaccctaagttgcctttgttcacagtaaggtaatcggggcgaaaagcccggcttttgcgatgaatttagaaaaaatcaatgagttaaccgcgcaagatatggcgggtgttaatgcggcaatccttgagcagcttaattccgacgtccaactgatcaatcagttaggctattacatcgtcagcggcggcggtaaacgtattcgtccgatgattgctgtactggctgcacgagctgttggctatgagggaaatgcgcatgtcaccattgctgccctgatcgagtttatccacacggcgactctgctacacgacgacgttgtggatgaatcagatatgcgcaggggtaaagctaccgccaacgccgcatttggcaatgccgccagcgtgctggtaggcgattttatttatacccgcgctttccagatgatgaccagcctcggttcgctcaaagtgctggaagtcatgtcagaagccgtaaacgtcatcgcagaaggtgaagttctgcaactgatgaacgttaacgatccggacatcactgaagaaaactacatgcgcgttatctatagcaaaaccgcgcgtctgtttgaggctgccgcgcagtgttccgggattctggctggctgtacgccggaggaggagaaaggcctgcaggattatgggcgctatctcggcactgctttccagttgatcgacgatttactcgattacaatgccgatggcgaacagttaggtaaaaatgtcggcgacgatctgaacgaaggtaaaccgacgctgccgctgctgcatgcgatgcatcatggcacaccagaacaggcacagatgatccgtaccgccatcgaacagggtaacggtcgccatcttctggaaccggttctggaagcaatgaacgcttgtggatctcttgaatggacgcgtcagcgtgccgaggaagaagcagacaaagccatcgcagcgttacaggtgctcccggacaccccttggcgagaagcactcatcggcctcgcgcacatcgctgttcaacgcgatcgttaatcccctcccctcatcccgcgcagcgcgcgggatggttccagtaagttccataaaaacacttattcagctctataacacctgaaaaatagggatgtgcatctttatatattctgaatattcacactctttacaggaactttttagagcaataggccatcaggagtatagtgatgctcgacagaagaagtgttctgaatgaaagcgactaacttaaggagtgaggaaaaatggaaagtaatttcattgactggcatcccgctgacatcattgcgggtttgcgcaagaagggaacgtcaatggcggcggaatctcgcagaaatggtttgagttcctcaacgctggcgaatgcattatcgcgcccatggccgaaaggagagatgattattgcgaaagccctgggaactgacccctgggttatctggccatcacgctaccatgatccgcagacccatgagtttatcgacagaacgcagttgatgcgtagctacactaaaccgaaaaaatgagtggtctggcggtagccccgcgaacggggctgccagctctcagacgattattcgcctttcacacgctcaatatttgcacctaaagcgcgcagtttgtcttcaatgcgttcgtagccacgatcgatgtgataaatacgatcaaccaccgtcgtcccttccgcaatacagccagccagcaccaggcttgctgatgcacgcagatcggttgccataacctgtgcgccagaaagtttttcaacaccgtgacaaataacggtattgctttcgatttcggcgtgcgcgcccatacggctcagctctggcacatgcataaagcggttttcaaagaccgtttcggtgataaacccggtcccttctgccaccaggttcaacagcgtgaactgggcctgcatatcggtcgggaatgccggatgcggcgcggtacgtacgttaacagccttcggacgtttgccatgcatatccaggctaatccagtcttcgccgacttcgatgtccgctccagcgtcacgcagtttcgccagcacggcgtcgagagtatctggctgcgcgttacggcagataattttgccgcgagaaatcgccgccgccaccaggaaagtaccggtttcgatacgatccggcagaacgcgatagacaccgccgcctaaacgttccacaccttcgatgacgatacgatcggtgccctgaccgctaattttcgcacccagcgtaatcaggaagttcgcggtatcgacgatttccggttcacgcgctgcgttttcaataatcgtggtgccttccgccagggttgcagcacacatgatggtcaccgttgcgccaacgctgactttatccatcacgatatgtgcacctttcaaacgaccatcgacggaagctttaacgtaaccttcttccagtttgatggtcgcgcctaattgttcgaggccagaaatgtgtagatcaaccggacgcgcaccgatcgtacaaccgccaggtagtgaaacttgcccctgaccaaagcgcgctaccagcggccccagcgcccagatagaagcacgcatggttttaaccagatcgtaaggtgcgcagaatacattaacgtcgcgggcatcaatatgcacagaaccattacgttctactttcgcacccagctggcttagcagcttcattgatgtatcgacgtctttcagtttcgggacgttctggatctctaccggttcttccgccagtagtgcggcaaaaaggataggcagagcagcatttttagcgccggaaattgtgacttcgccctggagcttcgttggcccctgaacacgaaatttatccatttagtttgttctcagttaacaattcatatccgctaccggcgaatcgcccatagctcaaaagccgttcagtttgcgatcgcgcgcccactccgcaggggtatacgctttgatcgacacagcatgaatgcggttatccgcaatatattccatcagcggaccatagaccgtctgctgttttttaacccgactcatgccgtcaaacaactcacccacggcaataacctgaaagtggctgccatcgccggaaacgtggacttcctggagggagagagcgttcatcaacacgctctgaatttcattattttccatgggatcttcaatcatcagttaataaaccagcgaaacatcttagagcaaagttgcgctggcataaataagcaaaaagcctcgctgataaatcagacaaggctcgacttgcaggcaggtttgccggacaggcggttaacgccatatccggcctgaaaaaatttaacgaggcagaacatcagcaggcaaattatacaatttcgccagggtatacactttgtcgtttaccccctgaagcgtcacattgttgccctgctttttcgccagatcgataagatggagcagcagtgccagtccccccgtatccacgcgggagacacggctaagatcgatgcaggtaatccccttcaccgcttcctcacgcatttcccaaagcggtagcaaaacgtcctgatccagctctccggataacgccagcgtgtcacccgtctgcatccagctcagtgactcgctcattattttttctcttccagagtgattttctgttgagaaatcgatttcagttgcgcagtcaggccgtcgatacctttggtacgcagcagcgttccccactcgttttgtttggtggtgatcatactgacgccttcagcaatcatgtcgtaagcctgccaattgcccgtctgggagtttttacgccactggaagtccagacgcaccggcggacggccattcgggtcaataatggtaacgcgaataggcacaatggttttatcgcccagcggctgttctggcgcaatctgataggtttgaccgtgatacatcgccagcgcctgaccgtaagcctgcttcaggtactcacggaaagcggcaaagtaggcttcacgttgagcaggggtcgcactcttgtaatactggcccagcaccagcgcaccggcgtatttcacctgtacgtatggcagcagttcctgatcaacaatggtacgcagataatccgggttggcccgaatttgcggttgctcattcttcaggcgatcgaacgttttctgcgccgcctcgtccatcagcttatacggattggtctggtctgccgcggttgccgcactcagaggtgcaatcaccagcaaagcgaccatcattaaacgtttaaacatgcgtcggttctcctgaaattatttcgttgtacccacaggttcagtggtttcattattacctggcgcagcagctggcgcatcgccactattcttattgtcatcgcctttactaccgtaaaggaactgaccaatgagatcttccagcaccatcgcagacttagtgtcctgaattgtatcgccatccttcaggatagcagtccccagttccgggtcttcaaaaccgacgtttaatgccagatattgttcccccagcaggccggaagtacgaatgctcagcgaactggtatctggaatgtggttataacgttgttcaatttccagcgttacgcgcggcagataggttttcgggtccagcgtaatatccgccacccgacccacaacaacgccaccaatactgaccggagagcgcgctttcaggccgccaatgttatcgaacgtcgcataaagcgtgtaggtcggttcagtacgtatggacgtcacgttcgccgccttcaggcaaacaaacagcgccgccagcagtgctgctaataaaaagatacccacccaaatttcattttttttcgtttgcatgaactcaattcccaaacatcaatgcggtcagcacaaaatccagccccagaacagccagagacgagtggacaacggtgcgagtggttgcccggctaatcccggcagacgtcgggatggcgtcgtagccgttaaacaacgaaatccacgtcaccgtgatggcgaacaccacgctcttaatcagacagttgaccagatccatacgccagtcgacggcattttgcattgccgaccagaagaacccgctatcaatgcctttccaactgacgccgaccagagatccgccccagatccccacggcgacgaaaataaccgtcaacagtggtaatgaaataaccccagcccagaaacggggagaaataacccgacgcagcggatccaccgccatcatctccatactggagagttgctctgtagcgcgcatcaggccgatttctgcggttagcgccgaaccagcacgcccggcaaacaacaacgcggcaaccaccggccccagttcacgcagtagcgataacgccaccagcatacccagactggtttccgcactataagtggtcagaaccagataaccttgcagccccaacaccattccgatgaacacgccagaaaccacaataatcagcatcgacaggacgccgacattatagagctggcgcaccagcagcggcgcatgtttgcgaaattccggtttgccgaccagcgcattgaataacattaacccggcccgcccgaacgttctcagggttttaatccctttatgtccgagcgacgccagcgcatttaacagcatgagtggcttaactccctggtaaaagatcagcgtgataatcgccggcaggatagcggaacggaacaggcccgtcagctatcccgtccagaaactgacgtacgcgcggatcaggattcgcctgcaacgcctgggcactgccatgagcgacaatttttttgtccgccaggatccaggcgtgatccgcaatacttaacacttccggcacatcgtgagaaaccaccacacaagtcacgcccagcgcgctgttcagctcagaaatcagcttcaccagtacgcccatggtgatgggatcttgcccaacaaaaggttcatcaaacatgatgagatccggctccagcgcaatcgcacgcgccagcgctgcacgccgcgccatcccaccggaaagttcagaaggcattagtttagccgctccacgcagccccacggcctccagcttcatcatcaccgtactatgcaacaatggcgcgggaagttgggtatgttcgcgcagtggataggcgacgttgtcaaatacgttcatatcagtgaacaacgccccggactgaaataacatgctcatccgtttgcgcactgtatacaggcgcgaacgagacatcgccggaatattctcaccatcgaaaaggatctcaccatgatctggtgcgatttgcccgccaatcagacggagtagcgtcgttttaccgatgcccgatggccccatgatcgccgtgatcttccctcgcggcacggtcagggaaatattatcgaagatgcagcgattgccacgcgtaaaactgacatcgcgcatatcgactaaattcgccacagactgctccataattcacccttcgtcttgcgttgattttctaagcatggcgctcaatttaaccttgaacccaacatatttacagaatattacccgccgtggttagcgaaagctggcatttgttttactttttagccgcataaagtcaaaattaagcatccgttacggctttctgaaaatcttcagcggaccggcgagtatacctgaagaaaggacgttagatgcttttagctacggcactgttaattgttggtttacttttggtcgtttacagtgccgaccgcctggtttttgccgcgtctattctttgccgaacctttggcatcccgccgctgatcatcggcatgacggtggtcagtattggtacatcgttaccagaagtcatcgtctcgcttgccgcgtctctgcacgaacaacgcgatttagccgttggtacagccctcggctcaaacattatcaatatattgctgatcctcggtctggctgcgctggttcgtccttttaccgtccattctgatgttctacgccgtgaattacccttaatgttgttggtcagcgtggtggccggttccgtactctatgacggacaacttagtcgcagcgatggtatctttctcctctttctggctgtgctatggctgctgttcattgttaaacttgcacgtcaggctgaacgtcaggggactgacagcctgaccagagagcagcttgcagagctgccgcgtgacggcggattgcccgtcgcgtttttatggctcggcattgcgcttatcatcatgccagtggccacgcggatggtggttgataacgccacggtgctggcgaattactttgccatcagcgagttgacgatgggtctgacggcaattgctatcggaaccagcctgccggaactggcaaccgcaatagcgggggttcgcaaaggtgaaaacgacattgctgtcggaaatatcattggcgcaaacatttttaatattgtcatcgtgttgggtttacccgcgctgataacgccaggagagattgatccactggcgtacagtcgtgactacagcgtgatgttgctggtgagcattatttttgcgttgctgtgctggcggcgctccccgcaaccgggccgtggtgtaggggtattattaactggcggatttatcgtatggctggcgatgttgtactggttatcgccaatactcgttgaataactggaaacgcattatgtcgcacgtagagttacaaccgggttttgactttcagcaagcaggtaaagaagtcctggcgattgaacgtgaatgcctggcggagcttgatcaatacatcaatcagaatttcacgcttgcctgtgaaaagatgttctggtgtaaagggaaagttgtcgtcatggggatgggaaaatcggggcatattgggcgaaaaatggcggcaacgtttgccagcaccggtacaccttcatttttcgtccatcctggtgaagccgcgcatggtgatttaggcatggttaccccacaggatgtggtgattgctatctctaactctggtgaatccagcgaaatcacggccttaattccagtgcttaagcgtcttcacgtaccgttaatctgcatcaccggtcgcccggagagcagcatggcgcgcgccgcagatgtgcatctgtgtgttaaagtagcgaaagaagcctgtccgttagggctggcaccgaccagcagcaccaccgccacgctggttatgggcgatgccctcgctgtcgcgctgttaaaagcacgcggctttactgctgaagattttgcgctctcacacccaggcggcgcactgggtcgtaaacttctgctgcgcgtaaacgatattatgcatacgggcgatgagatcccgcatgttaagaaaacggccagtctgcgtgacgcgttgctggaagttacccgcaaaaatcttggtatgactgtcatttgcgatgacaatatgatgattgaaggcatctttaccgacggtgatttacgccgtgtcttcgatatgggcgtggatgttcgtcagttaagtattgccgatgtgatgacgccggggggaatacgtgtgcgccctggcattctggccgttgaggcactgaacttaatgcagtcccgccatatcacctccgtgatggttgccgatggcgaccatttactcggtgtgttacatatgcatgatttactgcgtgcaggcgtagtgtaaagattcaaggataaacaacaatgagcaaagcaggtgcgtcgcttgcgacctgttacggccctgtcagcgccgacgttatagcaaaagcagagaacattcgtctgctgatcctcgatgtcgatggcgtactgtcagatggcctgatttatatgggcaataatggcgaagagctgaaagcgttcaatgttcgtgacggttatggcattcgttgtgcgctcacctctgatattgaagtcgctatcattaccgggcgaaaggctaaactggtagaagatcgttgtgccacattggggatcactcacttgtatcaggggcagtcaaacaaactgatcgcctttagcgatctgctggaaaaactggcgattgccccggaaaatgtggcttatgtcggcgatgatctcatcgactggccggtaatggaaaaagtgggtttaagcgtcgccgtggccgatgcgcatccactgttgatcccgcgcgccgattacgtgacgcgcattgctggcggtcgtggcgcagtgcgcgaagtttgcgacttattactcctggcgcagggcaaactggatgaagccaaagggcaatcgatatgagtaaagccagacgttgggttatcattgtgctatcactggcggttctggtgatgatcggcattaatatggccgaaaaagacgataccgcccaggtggtcgtcaacaacaatgatcccacctataaaagcgagcatacggacacgctcgtctataacccagaaggggcactaagctatcgattgattgctcaacacgttgaatattattccgatcaggccgtttcgtggtttacgcagccggtacttaccacgtttgataaggataaaatcccgacatggtccgtaaaagcagataaagccaagctgaccaatgaccggatgctctatttatatggacacgttgaagtcaacgcacttgtgccagactctcaacttcgcagaatcacgacggataacgcgcagatcaatctggtgacgcaggatgttacctctgaagacctcgtcacgttatacggaacaacatttaactccagcggtctgaaaatgcgcggcaacttacgcagcaagaacgccgagctgattgaaaaggttagaacatcctatgaaattcaaaacaaacaaactcagccttaatcttgtgcttgccagctcacttctggccgccagcattccggcatttgccgtaaccggagacactgatcagccgatccacattgaatcggaccagcaatctcttgatatgcaaggcaacgtggttacctttaccggtaatgtcatcgtcacccagggcaccatcaaaattaatgccgacaaagtggtcgttacccgtccgggcggcgaacaaggtaaagaagtgattgacggctacggtaaaccggcaacgttctaccagatgcaggacaacggtaaacccgttgaaggtcacgcttcccagatgcactacgaactggcaaaagattttgtcgttctgacgggtaatgcttatctgcagcaggtcgatagcaacattaagggcgataagatcacttacctggtgaaagagcagaaaatgcaggctttcagcgacaaaggcaagcgcgtaacaaccgttctggtgccgtcgcagctgcaggacaaaaacaacaaaggccagaccccggcacagaagaagggtaattaattcgttatggcaacattaactgcaaagaaccttgcaaaagcctataaaggccgtcgcgtggtagaagacgtcagcctgaccgtcaactccggggaaattgtcggtctgctggggccaaacggtgccggtaagaccaccactttctacatggttgtaggcattgtgccgcgcgatgcgggcaacatcattattgatgatgacgatatcagtctgctgcctctgcatgcacgcgcgcgccgcggtatcggctatctgccacaggaagcctccattttccgtcgcctcagcgtttacgataacctgatggcggtactgcaaattcgtgacgacttgtctgctgaacaacgtgaagaccgcgcgaacgagctgatggaagagtttcacattgagcacctgcgtgacagcatggggcagtcactctccgggggtgaacgtcgccgtgtagaaattgcccgcgcactggctgcgaatccgaaatttattctgctcgacgaaccgtttgccggggttgacccgatctcggttatcgacattaaacgcatcattgagcacctgcgcgacagcggcctgggcgtgctgatcactgaccacaacgtgcgtgaaacactggcggtttgtgaacgcgcttatatcgtcagtcaggggcatttgatcgcccacggcacgcctacagaaatcttacaagacgaacacgttaagcgtgtataccttggggaagacttcagactctgatagggtagaagtttgcgacgttttagcaggagagtacgattctgaacatgaagcaaggtttgcaactcaggcttagccaacaactggcgatgacgccacagctccaacaggcaattcgtctgttgcagttgtcgacgctggaacttcagcaggagctacagcaggcgctggagagtaatccgctgcttgagcaaatcgacactcatgaagaaatcgacacccgcgaaacgcaagacagtgaaacgctggacaccgccgacgcgctcgaacaaaaagagatgccggaagagctgccgctcgatgccagttgggacaccatttacaccgctggtacaccatccggcaccagcggtgactacattgacgacgagctgccggtctaccagggcgaaacgacgcagaccttgcaggattacctgatgtggcaggttgagctgacaccgttttccgacactgaccgcgctattgctacctctatcgtcgatgccgttgatgaaaccggttatctgactgtcccgctggaagatattctcgaaagtataggcgatgaagagatcgacatcgacgaagttgaagccgtccttaagcggatccaacggtttgatccggtcggtgtggcggcaaaagatctgcgtgactgtctgctgatccaactctcccaattcgataagaccacgccgtggctggaagaggccagactgatcattagcgatcatctcgatctgttagccaatcacgacttccgcactttaatgcgcgtcacgcgtctgaaagaagatgtgctgaaagaagccgtcaatctgatccagtcgctcgatccgcgccccgggcagtcgatccagactggcgaacctgagtatgtcattccagatgtgctggtgcgtaagcataacggtcactggacggtagaactcaacagtgacagcattccgcgtctgcaaatcaaccagcactacgcctcgatgtgcaataacgcgcgcaacgatggtgacagccagtttatccgcagcaatctgcaggatgccaaatggttgatcaagagtctggaaagccgtaacgatacgctactgcgcgtgagtcgctgtatcgttgaacagcagcaagccttctttgagcaaggtgaagaatatatgaaaccgatggtactggccgatatcgcccaggctgtcgaaatgcatgaatcgacgatatctcgcgtgaccacgcaaaaatacctgcatagtccacgaggcatttttgaactgaagtatttcttttccagtcacgtcaataccgagggcggcggcgaagcttcctccacggcgattcgtgcgctggtgaagaaattaatcgcggcggaaaacccagcgaaaccgttgagcgacagcaagttaacctctttgctgtcggaacaaggtatcatggtggcacgccgcactgttgcgaagtaccgagagtctttatccattccgccgtcaaaccagcgtaaacaactcgtttgacccaaccgataaggaagacactatgcagctcaacattaccggaaataacgtcgagatcaccgaggcactgcgcgaatttgttacagccaaatttgccaaacttgagcaatattttgaccgaatcaaccaggtctatgttgttctgaaagtggagaaagtcacccacacctcagatgcaacactgcatgtaaacggtggtgaaattcatgccagcgcggaaggtcaggacatgtacgctgccattgatggcttaattgataagctggcacgccagttgaccaaacataaagataaactgaaacaacactaattgtccgggcaattagcatgtgcatggcggtctgttgtgcggcacaacgggccatttgtacggttaatgctccgagcctgttccactgtttgagtgggcaggttcttaggtgaaattatgacaaataatgatacaactctacagcttagcagtgttcttaacagggaatgtacgcgaagccgcgtccactgtcagagcaaaaaacgcgccctggaaatcatcagcgagctggcggcgaaacaacttagcctgccgcctcaggtggtttttgaagctatcctgacgcgggaaaaaatgggcagtaccggtatcggcaatggtattgccattccgcatggcaaactggaagaagatactctgcgcgccgttggcgttttcgttcagctcgaaacgcctatagctttcgatgccatcgacaaccaaccggtggacttactttttgccctgctggtgccggcagaccaaactaaaacgcacctgcatactctgtcgctggtggcgaaacgtctggcggacaaaaccatctgccgccgtttacgcgcagcccagagcgatgaagagctgtatcaaatcattacggataccgaaggtactccggatgaagcgtagttattcggtaatgtctcttttagacgttgtgaggagaaacagtacatggtactgatgatcgtcagcggacgttcaggttcaggtaaatctgtcgccctgcgtgcgctggaagatatgggtttttactgcgtggataaccttcccgtagtgttgttacccgatctggctcgaaccctggccgatcgcgagatttctgccgccgtcagcattgatgttcgtaatatgccggagtcaccagaaatattcgaacaggcgatgagtaacctgcctgacgctttctcaccgcaactcctgttcctggatgccgaccgtaataccttaattcgtcgttacagtgacacgcgccgactgcatccgctttccagcaaaaacctgtcgctggaaagtgctatcgacaaagaaagcgatttgctggagcctctgcgttcgcgagcggatctgattgtcgatacctcagaaatgtccgttcacgagctggctgaaatgctgcgtacccgtctgctgggtaaacgtgaacgcgaactgaccatggtctttgagtctttcggcttcaaacacggtatccctatcgatgcagattacgtctttgacgtgcgcttcttgccgaacccgcactgggatccgaaactgcgtccaatgacaggtcttgataaacctgtcgccgcgttcctcgaccgccacacagaagtacacaattttatctaccagacgcgaagctatcttgagctatggttacctatgctggaaaccaacaaccgtagctacttgacggtcgccattggttgtaccggcgggaagcaccgttcggtgtatattgcagagcaactggcagactacttccgctcgcgcggtaaaaacgtccagtcacgccatcgtacgctggaaaaacgtaaaccatgaccgtcaagcaaactgttgaaatcacaaacaagctgggcatgcatgcccggcctgcaatgaagctgtttgaattaatgcagggttttgacgctgaagtgctcttacgtaatgacgaaggcaccgaggctgaagccaacagcgttattgcgctgctgatgttggattctgccaaaggacggcagattgaagttgaagcgaccggtccacaggaagaggaagcactggccgccgttatcgccctctttaattctggttttgatgaagattaatcttcatcactttgacatacaactcccttcaaactccccccgacaataagaaaatcacgtactgaaatcgttctcaatcaacgtcatttgtacattttgtgcgcttttcactttcagaagaaccttaagaaaaccttaagaggcattgtttaggttttgtttaagttaatcgaccatactggagatcgtcagaaaatatttccaggagatggcatgattcgcttatctgaacaaagtcccctgggcaccggaagacatcggaaatgttatgcgcatccggaagatgcccaacgctgtatcaagattgtctaccatcgtggcgatggtggcgataaagagatccgccgtgagttaaagtactacgcgcatcttggtcgccggttaaaagactggagtggaataccgcgctatcacggtaccgttgagacggattgcggaaccggttatgtctacgatgtgattgcagattttgacggcaagccttccattacgctgaccgaatttgctgaacaatgccgttacgaagaagacattgcacaactgcgccagctactgaaacagctgaagcgttatttgcaggataaccgtatcgtgacgatgtcgctgaagccgcagaatatcctctgtcaccgcatcagtgagtcagaggttatcccggtcgtctgcgacaacattggtgaaagcacattgattccactggcgacctggtcgaagtggtgttgtctgcgtaagcaagagcggttatggaaacgatttatcgcccaaccggcgctggctattgccctgcagaaagatctgcaacctcgtgagagcaaaacgctggccctcacttcgcgcgaagcttaatccagctggtgttgttgcataaacggctcaccgcctaactgatacatctgccgtaaaatccacgcctgacggctacgcacgtagcccgatggcgaggagactttgaaacgaagtggattaggtaatacagctgccagtaatgcagcttccgaccgggtaagtttgctcgcgggtttgtggaaataacgttgtgccgcagcttcgacgccaaacacaccgtcgccaaattcggcgatattcaggtaaaccgtcaggatacgctttttgctccagaccgtttctatccccagcgttaatccggcttccagcccttttcgaacccagctacgcccatcccataaaaagagatttttggctgtctgttgagaaatcgttgaagcaccgcgaatacggttttcattgcgctcgttgtgcgccagggctttctcaatggaagcgacatcaaagccccagtgctcaggaaatttctgatcttctgcggcaatcaccgccagtcccatccacggcgagatttgatccatactgacccagtcagaatgtgccacgtaacgaaaattgccatgcagccaggcgctgacctgtcgctcgaccattaccgctgagaagggaacaggcgcaacgctaaacaacgcgatgcccccgccccagaaaacggcgaggacaaccattaaccgcaaaagaaaacggcgaacgaaactaaacaccgttaagcggcttttactcattcagccagaaccagcacgcgggaaaccagcttatcaatgccgctcgccgcttctgcaatgttctgcgccagcatatatgctggggtggtgacaatcttattgtcttcatcaaccacgatatcatcgacaggacacggcacatgctccgcgcccatctcttccagcacttctgcggtatcgatatcagtaccgatggtcaaacgcagcgggaaatcgaaaattttcggcagcatcgccggggcaatacacataaaaccaagcggttttccggcctgatgcatcgcttgtgccagcgcctttaattcacggtcaacggtgcattcgctaccaagactggcaaaattgcttaaattcttcgccgcgccaaacccccccggcacaatcaacgcatccagttcagcggcatcggcctgggccagaggacggatttcaccgcgcgttattcgtgccgcttcaatcagcacattgcgcgtttccgtcatcgcttcgccagttaaatggttgataacatcaacctgctgcttatccggtgcaaagcagaccgcctgcgcaccgctgcgtgaaatagctaacaacgtcaacaccgcttcatgaatttcagaaccgtcatagacgccgcatccgctcagaattacgccaattttcttcattgtgatcatcctttcgcaattgactgaaacacattaatttttttaataaaaatggtacgcatcacacatttaactgattcatgtaacaaatcatttaagttttgctatcttaactgcgtgcggcctgaaaaacagtgctgtgcccttgtaactcatcataataatttacggcgcagccaagatttccctggtgttggcgcagtattcgcgcaccccggtctagccggggtcattttttagtggcttttgccacccacgctttcagcacttctacgtcgtgacgccactcttctttcatctcttcaatccattcaccgacgttatcttcccaggccggaaggtcaggagactgaatttgctgacccagctgttgcagatggcgtaaccccactgaccccgccgcacctttaattttatgtccttcctcaacaatgccttttttatcctgcgccgtcagattcgactccagcacgctgacatagcccggcatcatcttctcaaacaccgctaacccgtcggtgatcagcttcggtcctacaagttcgagatactgttccagcatgggaatatcgagcaatgcttctgatttactgttctcttctgtcgtcaccgtactctcctcatcatcctgggtatcccagaatttcttgatcatcgcggttagcgccggaacagaaagcggcttactcagcacatcatccattccagcattgaggtactcttgtttgtctttcagcacgttagcggttaaggccaccagcggcggtaaatcctcgcgcggataacgtttcgtcagttcacgagagatatccagcccggtcatatctggcaactgaatatccagcaacaccaggtcgtattcgcccggtttaaacatctccagcgccgccttgccggtcatggcgacatcaacgctgttacctaatttttccagcacagaacgcgcaacaatcacgttcagttcaatgtcttccaccagcagcacattcagcgccggtaaaggcatatcgtcttcatcaaacgcatcatcgacctcttctgctaccgacggtgcgtggatcgtcaacgtaaaggttgaacctttgccctgttcgctggtaaccgtaatatcgccgcccatatttttcgccagacgacgagaaacggccagaccaataccggtgccggtggcaggtttaccgccatgactgtctttcacctggtaatacatggcgaaaattttatccagctcatcctgcggaatgccgataccagagtcttccacttcaaaatgcagcatatcgccttcatcgtagcgcacgcgcacggtaacctggccttgctgggtgaatttgacggcgttactgatgaggttccacaggatctgccgtaaacgcgtcccgtcggtaatgacctgatgcggtaatggcagcgtcggctccaggttaaagcgcaatcctttttgttgcgcctgcaatgcggagagattttccagatcggcaaggaagctggtgaaatcaaccggttgattatcaagctggaccttgcgccgttccatcttatccatgtcgataatatcgttaaagatattccccagcgtgacggccgaaacatggatggtcttgagatatttttcctgctcggcggtgagttcggtatccagcagaatgcggctcagaccgacgataccgttcagcggtgtacgcaattcgtgactgatggtggagataaacgtcgttttgtcgcggctggcccgttcaagcgcatcctgataccgcttacgctcggtaatgtcgcgaccaaagcccatcaaaccgtgacgtttacccacgcggtcgtagtacggcactttacggatttcaaagcaggctttgcgcccgtccgggtaatccagccactgttcataggtcagtgacacattatgacggaacactttttcatcggtttcaatgacttttgcggcggcttccggtgagtaaacatcagcaggtttcaggtgaaccagttgtttttcgctttttccggtcagcagctccatcgcgcggttacagccggaaaactctttatcttcgttacgataaaaaaccaggtcgggtgaagcatcaaggaaggaacgtaagaatgaggattgctgctcgagctgaatttgtgtctcttcgcgctctttgatttcaattttcagttggccgaaggtttcctgcagttctgcttccgctttttcacgaacggcaatttcctgatttagctgggcaatattatcttttaactgaacgttgaggctcaaatcgcgctcgcgcatctcctccagtttttgcaccagccgtgacagacgttgtcgtgactcctccagttgctcgacgaccaccgatagaaagtagaccgcccacggcgtaatcagcaaaccaaagaagatagaacgaataacatcaatgctttcgacctgaccatgcagcaccatggttaccgccatttgtaccacaatggcaagaacgacgagggccagcgccagcaacattgagaagcgcaccagacctaacttcatcatcaggtcaacataatactgcgccagcagacgaatttgcttcattagggaattccttcacgacaacctgccccaataatacccaattctgacagttacgttataaattgtgtgagaaatgcggaattcccctcaacgacctactccgttggaggtagccacggacgtcccagcgccgatccctgtacgccatgttcattcagatagcgatccagctcgaccattcccgtccatcgattttcgcaccacagcggagcaagcagcgtcgggcgacgggcgctggcggaaatgcggtggtagatcacttccggtggcgtatggcgaatcatttctccggcagtgagcgtgtaatcctccagttcaataccgttcaaacgccccgcttcccaggctttcgccataatgctgcctttcacaatatgcagcggatgcagctttatgccgtccacgccggtttcaaccactcgctccagcgtttgcaaacattcagcctgcccttcgccaggcaggccgacaattaagtgggaacacaccttcagcccgcgctgacgtgccagctgggttgtacgctgataacaggcaaaatcatggccgcggttgatgcgatgcagtgttttgtcgtgggcggtttgtagccccagctccagccacacttcgtaaccctggtccttatattcgcaaagcagatccagcaccgcatccggcacgcagtccgggcgggtacccacacacaaaccgacaatattggcctggctcaccgcctgctgatacatagaacgcagcacctgaacttccgcaaaggtgctggtatacgcctgaaagtaggccagatagcgtttagcgcggttaactaaattcgcctggtgcgccagttgctcggcaatggaacgatgctgctgcgcttcatcggcaaacgaggcaacattacagaatgtgcagccaccacgcccgatggtaccgtcacggttagggcagctaaaaccgccgtgcagcgtcagcttatgcaccttttgcccataacgacgggtgagatcaccaccaaacatattgactaatttctgtaactgcataatctgatagaccgcgccttgaaaagaggccaaagcctgccatttttagctcaattcggcgatgacctggatcaatcgtcccggcctgcttttatcaactgcataatcaatcaaaattaccgaaatttcatgcataatcacataaatcacttttgcttatcttgtgtcagatttttttatctcctgatggattttaggcaaaaacagtagcatgaaacgtcattaccaattaaggcagtataaaatgctggttttgtcgtcagttcaaggcaggataagggttaacacacctttatgacagtcaggaattgactgtttctctaacgacttcccttttagccttaaagataaaatccattttaatttcagtcatttaataaagaattttgcgctaaagcacatttctgtaccaataagcttgccatttgacctgtatcagctttcccgataagttggaaatccgctggaagctttctggatgagcagcctgctcatcatatttatgcagtaattgagatcccctcttcaccgtattaaccgatgcgaaaaggacaacaagggggcgaatgcgaggcgcgcgtatgacacgcaaaccccgtcgccacgctctttctgtgcccgtgcgcagcggttcggaagtggggttcccgcagagcctgggggaggttcacgatatgttgtacgataaatcccttgagagggataactgtggtttcggcctgatcgcccacatagaaggcgaacctagccacaaggtagtgcgtactgcaatacacgcactggcccgcatgcagcaccgtggcgcgattctcgccgatggtaaaaccggcgacggttgcggcttgctgttacaaaaaccggatcgcttttttcgcatcgttgcgcaggagcgcggctggcgtttagcaaaaaactacgctgtcgggatgctcttcctgaataaagatcctgaactcgccgctgccgcacgccgcatcgttgaagaagaactgcaacgcgaaaccttgtcgattgtgggctggcgtgatgtccccactaacgaaggcgtgctgggtgaaatcgccctctcctctctgccacgcattgagcaaatttttgtgaacgccccggcaggctggcgtccacgcgatatggagcgccgtctgtttatcgcccgccgccgcattgaaaagcgtctcgaagccgacaaagacttctacgtctgtagcctgtcgaatctggtgaacatctataaaggtctgtgtatgccgacggatctgccgcgcttttatctggatcttgcggacctgcgtctggaatcggccatttgcctgttccaccagcgcttctccactaacaccgtaccgcgctggccgctggcgcaaccgttccgctatctggcgcataacggtgaaatcaacaccatcaccggtaaccgccaatgggcgcgtgcgcgtacttataaattccagacaccgcttatccctgacctgcacgacgccgcaccgttcgtcaacgaaaccggctctgactccagttcgatggataacatgctggaactgctgctggcaggcgggatggatatcatccgcgccatgcgtctattagtaccacccgcctggcagaacaacccggatatggacccggaactgcgtgccttctttgactttaactccatgcatatggagccgtgggatggcccggcgggcatcgtgatgtccgacggtcgttttgccgcctgtaacctcgaccgtaacggtctgcgtccggcgcgctacgtcatcaccaaagataagctcatcacctgcgcctctgaagtcggtatctgggattaccagcctgacgaagtggtcgaaaaaggccgcgtcgggccaggcgaactgatggttatcgacacccgcagtgggcgtattctgcactcggcagaaaccgatgacgatctgaaaagccgccatccatataaagagtggatggagaaaaacgtccgccgactggtaccgtttgaagatctgcccgatgaagaagtgggtagccgcgaactggacgacgacacgcttgccagctaccagaaacagtttaactacagcgcggaagagctggactccgtaattcgcgtactgggcgaaaacggtcaggaagcggtcggttcgatgggcgatgataccccattcgccgtgctctccagtcagccgcgcattatttacgactacttccgccagcagtttgcccaggtgactaacccgccaatcgacccgctgcgtgaagcgcatgttatgtcgctcgccaccagtatcggtcgtgaaatgaacgtcttttgcgaagcagagggccaggcgcaccgtttaagctttaaatcgccgattctgctctactccgatttcaaacagctcacgacgatgaaagaggagcactaccgcgcagatacgctggatatcacctttgacgtcactaaaaccacgctcgaagcgacagtcaaagagctgtgcgacaaagccgaaaaaatggtacgtagcggcaccgtgctgctggtgctctccgaccggaatatcgctaaagatcgcctgccggttccagccccgatggcggttggcgcgatccagacccgtctggtcgatcaaagcctgcgttgcgatgccaacatcatcgtcgaaaccgccagcgcccgcgatccgcaccacttcgccgtgttgctgggcttcggcgcgacggctatttatccataccttgcctatgaaacgctgggccgcctggtagacacccatgcgattgccaaagattatcgtaccgtgatgctcaactaccgtaacggcatcaacaaaggcttgtacaaaatcatgtccaaaatgggcatctccaccatcgcctcttaccgctgctcgaaactgtttgaagcggtcggtctacacgatgatgtagtgggcctgtgcttccagggggcggtcagccgcattggtggagcaagctttgaagacttccagcaggatctgctgaatctgtcgaaacgtgcctggctggcgcgtaagcccatcagccagggcggtctgctgaaatacgtccacggcggcgaataccacgcctacaacccggacgtggtgcgcacgctgcaacaagcggtacaaagcggcgagtacagcgactatcaggaatacgcgaagctggttaatgagcgtccggcaaccacgctgcgcgatctgctggcaattacgccgggtgaaaacgcggtcaacattgctgatgttgaaccggcaagcgaactgtttaaacgctttgataccgccgcgatgtctatcggcgcgttaagcccggaagcccacgaggcgctggcggaagcgatgaacagcatcggcggtaattcgaactccggtgaaggcggcgaagacccggcgcgctacggcaccaacaaagtgtcgcgcatcaagcaggtggcttccggtcgctttggggttactccggcgtatctggtcaatgccgacgtcattcagattaaagtcgcccagggcgcgaagccaggcgaaggcggtcagttgccgggtgataaagtcacgccttacatcgccaaactgcgctattcggtgcccggagtgacgctgatctccccgccgccgcaccacgatatctactctatcgaggacttagcgcagctcattttcgacctcaagcaggttaacccgaaagcgatgatctccgtgaagctggtttccgaaccgggagtaggcaccatcgcgactggcgtggcaaaagcttatgcggacttgatcaccatcgcaggctatgacggcggcaccggcgcaagtccgctttcatcggtgaaatacgcaggctgtccgtgggagctggggcttgttgaaacccagcaggcgctggttgctaacggcttgcgtcacaagatccgtttgcaggtcgatggcggcctgaaaacgggtgtcgatatcatcaaggcggcgattctcggcgcagaaagcttcggcttcggcactggcccgatggtggcgctcggctgtaaatatctacgtatttgccatctgaacaactgcgcaacgggtgtagcaactcaggatgacaaactgcgtaagaaccactatcacggcctgccattcaaggtgacgaattactttgagtttatcgcccgtgaaacccgcgagctgatggcacagcttggcgtaacacgtctggtggatctgattggtcgcaccgacctgctgaaagagctggacggtttcaccgccaaacagcagaagctggcgctgtcgaagctgctggagactgccgaaccgcatccaggtaaggcactctactgcaccgaaaacaacccgccgtttgataacggcctgctgaacgcgcagttgctgcaacaggcgaaaccgtttgtcgatgagcgccagagcaaaaccttctggttcgatattcgcaacaccgaccgttctgtcggcgcgtcgctttcaggctatatcgcccagacgcacggcgatcaggggctggcagccgatcctatcaaagcgtacttcaacggcaccgcaggccagagcttcggcgtgtggaacgcgggcggcgtggaactgtacctgaccggtgatgccaacgactatgtcggtaaaggcatggcgggcggcttaatcgccattcgtcctccggttggttccgccttccgcagccatgaagcaagcattatcggcaacacctgcctgtatggcgcgaccggtggtcgtctgtatgccgcaggccgcgcgggtgaacgtttcggcgtgcgtaactccggtgctatcaccgtggtagaaggcattggcgacaacggttgtgaatatatgacgggtggtatcgtctgcattctgggtaaaaccggcgttaacttcggtgcgggcatgaccggcggtttcgcttacgttctcgatgaaagcggcgatttccgcaaacgcgttaacccggaactggtcgaggtcttaagcgttgacgctctggcgatccatgaagagcatctgcgtggtcttatcaccgagcatgtgcagcataccggctctcagcgcggtgaagagattctggcgaactggtcaaccttcgccactaaatttgcgctggttaaaccgaagtccagtgatgtaaaagcactgctgggtcaccgtagtcgtagcgcagctgagttgcgcgtgcaggcgcagtaaggggtagcaacaatgagtcagaatgtttatcaatttatcgacctgcagcgcgttgatccgccaaagaaaccgctgaagatccgcaaaattgagtttgttgaaatttacgagccgttttccgaaggccaggccaaagcgcaggctgaccgctgcctgtcgtgcggcaacccatactgcgagtggaaatgcccggtacacaactacatcccgaactggctgaagctcgccaacgaggggcgtatttttgaagcggcggaactgtcgcaccagaccaacaccctgccggaagtttgcggacgagtctgcccgcaagaccgtctgtgcgaaggttcctgcactctgaacgatgagtttggcgcggtgaccatcggcaacattgagcgctatatcaacgataaagcgttcgagatgggctggcgtccggatatgtctggtgtgaaacagaccggtaaaaaagtggcgattatcggcgcaggcccggcaggtctggcgtgtgcggatgtcctgacgcgtaacggcgtaaaagccgttgtcttcgaccgtcatccagaaattggcgggctgctgaccttcggtattccggccttcaagctggaaaaagaggtaatgacgcgtcgccgtgaaatcttcaccggcatgggtattgaattcaaactcaataccgaagtgggccgcgacgtacagctggacgatctgctgagtgattacgatgccgtgttccttggcgtcgggacttatcagtcaatgcgcggcgggctggaaaacgaagacgccgatggcgtgtacgcagcgctgccgttcctcatcgccaacaccaaacagttaatgggctttggtgaaacccgcgacgaaccgttcgtcagcatggaaggcaaacgcgtggtggtccttggcggtggcgacactgcgatggactgcgtgcgtacgtccgtgcgccagggagcgaagcacgttacctgtgcctatcgtcgtgatgaagagaacatgccgggttcccgccgcgaagtgaaaaacgcgcgggaagaaggcgtagagttcaaattcaacgtccagccgctgggtattgaagtgaacggtaacggcaaagtcagcggcgtaaaaatggtgcgtaccgaaatgggcgaaccggacgccaaaggccgtcgccgcgcggagatcgttgcaggttccgaacatatcgttccggcagatgcggtgatcatggcgtttggtttccgtccacacaacatggaatggctggcaaaacacagcgtcgagctggattcacaaggccgcatcatcgccccggaaggcagcgacaacgccttccagaccagcaacccgaaaatctttgctggcggcgatatcgtccgtggttccgatctggtggtgaccgctattgccgaaggtcgtaaggcggcagacggtattatgaactggctggaagtttaagcgaggtaacaatgaattcgccagactgtgtctggcgaatcaaattactgacgaagtgcgcgttgttttctggcaaatgcggcatgagcgtttgacctttcctataatagggataattttcaataaattgtgctttgttcaccaagtctgatgagtgaagcacatcaagcaatttctcatttacaatccgtctcaattacttgttaacacctctgacaataccgattctgcaagctattcagtcttttcattccatgtaaattgtctcgatattaatatacaaaatatgaatataaaaaaccaatatattatccttaattatctatatattttcctatttttcagcgcaaacattcatgtaatgaataattatcaccacaaaccacctcaccagcaccttattattcacatgatcgtaactataaaattcattaaataaatacatcccagcaagttggctatttctgaacgagttatttatttacattcacaaacagatatatatactgcttcagctttttattttaaaaaataaatttgttattaaggatatgttcatatgtttttcaaaaagaacctcacaacagctgctatttgtgcagcactttctgttgcagcattcagtgccatggcaacagattcaactgatacagaattaactatcatcggcgagtatacccctggtgcatgtaccccagttgttacgggcggcggcattgttgactatgggaaacatcataacagtgcgctgaatccgaccggtaaaagtaataaactggttcaactgggccgcaaaaacagcacattaaatataacctgcacagcaccaacgctaattgctgtaacctccaaggataaccgtcagtcgaccattgtagcgttaaacgacacatcctatattgaaaaagcttatgatactctcgtagatatgaagggaacgaaaaacgcctttggtttaggttctgcgcctaatggacaaaaaattggcgctgcatccattggtattgacaggtctaatggtgggattcacgcggcggacgatacaggtgaaattcctgtcgacctgattcaaactgaccactggtcagcagcgacccccacatggaaagcctcatctaatggcgcattctgctcgctgacaagttgctcagcaatcgagcgcggttattctgttgcaaaaacaggggaactgacacctgttgctattacagcggtcaccttcccgttactgattgatgctgcggtaaatgacaatactattcttggttctgatgaaacgatcaaactggatggtaacgtcactatcagcgttcagtatttataagaacttgtaatacagtttttatttttacgcattaaccagttagctataactcggacagattatgccctatgacatggtctgtcttaatcaatctcatcgcaaacagtgcataacatatattaacaatatgtttctgcgttatttatcattattacaggagttttaatttaaatgctcagacacattacattcactgtatttataacaacatcaatgaataccttagccacagggatggttcctgaaacatcagtattgctggttgatgaaaagcgtggtgaagctagtattaatattaagaatacagatgatcatccttcattgctttacaccaccattgttgatttgcctgaaagcaataaatcaattcgtttaatcccgactcagcccgttattcgtgttgaagccggtcaagtacaacaggttcgatttttacttcaggcgactgttcctctgcaatcagaagagctgaaacgcgtaacgttcgaaggtattccaccaaaagatgacaagagcagcagagttactgtttcaattcgtcaggatctacctgtactgatccacccggcttccctgccggaagagcgagagacctggaaattcctggaatggcgtaaaaatggcgaccaaattgagattagcaaccccagtaattatgtcgttcgtatgaccttacaatttaaaacgctcccttcaggaaaaacgggggctataaataagacctattttctaccacacaccagtacaactactgcattaacaaacgctacggatacaaaagtcgagttttacccagccagccgatatggttatcgcggtaataaatatgtcactgacttaaaataactttgcctggagcgacaaggatgttaaaaaaaacgttactggcctacaccattggttttgccttttctcccccagccaatgcagatggtatagagattgccgctgttgattttgatcgggaaacattaaaatcactaggtgtagatcctaatatatcgcattatttttcccgttcagcccgttttttgccaggtgaatattcactgatagtatcagtaaatggcgaaaaaaaaggcaacattgctacgcgctttgatgaaaatggcgacatttgtcttgatcaggcatttctgcaacaagccggtttaaaaattccttctgaagaaaaaaatggctgttacgactatatattgtcctacccgggtaccacaatcacaccattacctaaccaggaagcgttagatattatcgtttcaccacaggcgatcattcccatagggttggatctcacaaacgcagcaactggtggaacagctgcgctgctaaactactctctgatgagcagccgtgcagaattttctaatgggagttcggactactcccaggctgcacttgaaggcgggattaatattaatgactggatgttacgcagccatcagttccttacacaaacaaatggcacattcagtaaccagaactcgtcaacctaccttcaacgtacctttacagatcttaaaacactcatgcgagcaggtgaagttaacctcaataatagcgtgttggaaggagccagtatttacggtatcgaaatcgcaccggacaacgcattgcaaaccagcggcagtggtgtgcaagttactggtatagccaacacctctcaggctcgtgtcgagattcgtcaacaaggagttttaattcattccattctggttcctgcgggcgcattcactatccctgatgtacctgttcgcaatggtaatagtgatcttaatgtcaccgttgtcgaaacagacggtagttcgcacaactatattgttccctccaccctgtttaatcagcatgtagaaagcttccagggttatcgcttcgcgatagggcgggtagacgatgactatgacgaatcaccttgggtaattagtgcatcgagcggatggaatctgacacgctggagtgcaatgaacggcggcgttatcgtagcagaaaattatcaggcggcatcaatccggtcgagtctggttcccctgcccgatttaacagtgagcagccaaattagtacatcgcaggatacgaaagactcactgcaaggacagaaatatcgtcttgacgcgaactacaatctcccattttcacttgggctaacaaccagcctcactcgatctgatcgccattatcgcgaactgtctgaagcgattgatgatgattataccgatccgactaaaagcacttatgcgcttggtttaaactggtctaactccattctgggtggtttcaacatcagtggctataaaacatatagttacgacggtgacaatgactcaagcaaccttaatattaactggaacaaagcgttcaaacacgccacggtttccgtcaactggcagcatcaacttagtgcttcagaaaataatgaagacgatggtgatctgttctacgtcaacatcagtattccatttggcagatcaaacaccgccacactgtatactcgccatgacgatcataaaacccactatggtactggtgtcatgggagtcgtctcagatgagatgtcctactatgtgaatgctgaacgagatcacgacgaacgtgaaacgagcttgaacggcagtatcagttccaatctccattacacccaagtcagccttgccgcaggagcaagcggcagtgatagccgtacttacaacggtacgatgtcaggtggtattgccgtacatgatcagggagtgaccttttcaccgtggactatcaatgacactttcgccatcgcaaaaatggataacaatattgcaggtgtcagaattacatctcaggcaggcccagtatggacagattttcggggtaatgccgtcattccatcaatccagccgtggcgaacatcaggagttgagatcgataccgccagcttgccaaaaaatgtcgatatcggtaacggcacaaaaatgatcaaacaaggccgtggtgcagtagggaaagtcggattcagtgcgataacacaacgccgtgcattactcaatatcacactttccgacggcaaaaaactgcccagaggcgttgcgattgaagatagtgaaggcaactatctgacaacatcagtggatgacggtgttgtattcctcaataacatcaaaccggacatggtgctagatataaaagatgagcagcaatcatgccgtattcaccttacattcccagaagatgcaccaaaagatgtgttctatgagacagcaacaggagagtgccaatgaaacggataataacaggatgcctgctgctgaacttcgccatggccgctcaggcagagtgtaatatctccagtagcatacaaaatatcgactatggcaaacgaagtgctgccatgcgccaagttgaccggggtaaaacaacacaattagcagacagaacaatcacgctggtaatgcaatgcgatcaggacgctcatattcgtgttcagttgaataccgctaatatttccaacaacggatttggatttggcccgaatggttcattaaatctgatcgccagcgatgcattttcaggtagtaacaatctcgacctggcgttagccagtggcaaaaatgacaatccgggcagcacaggaacagcatcaattagggaaggtgcgaataagcggggaaattcttctcggctgactcagtcatttcatttcttcatgtttgagccgattttttctcccgtaaatgccttgaatcagcctatttagaccgtttcttcgccatttaaggcgttatccccagtttttagtgagatctctcccactgacgtatcatttggtccgcccgaaacaggttggccagcgtgaataacatcgccagttggttatcgtttttcagcaaccccttgtatctggctttcacgaagccgaactgtcgcttgatgatgcgaaatgggtgctccaccctggcccggatgctggctttcatgtattcgatgttgatggccgttttgttcttgcgtggatgctgtttcaaggttcttaccttgccggggcgctcggcgatcagccagtccacatccacctcggccagctcctcgcgctgtggcgccccttggtagccggcatcggctgagacaaattgctcctctccatgcagcagattacccagctgattgaggtcatgctcgttggccgcggtggtgaccaggctgtgggtcaggccactcttggcatcgacaccaatgtgggccttcatgccaaagtgccactgattgcctttcttggtctgatgcatctccggatcgcgttgctgctctttgttcttggtcgagctgggtgcctcaatgatggtggcatcgaccaaggtgccttgagtcatcatgacgcctgcttcggccagccagcgattgatggtcttgaacaattggcgggccagttgatgctgctccagcaggtggcggaaattcatgatggtggtgcggtccggcaaggcgctatccagggataaccgggcaaacagacgcatggaggcgatttcgtacagagcatcttccatcgcgccatcgctcaggttgtaccaatgctgcatgcagtgaatgcgtagcatggtttccagcggataaggtcgccggccattaccagccttggggtaaaacggctcgatgacttccaccatgttttgccatggcagaatctgctccatgcgggacaagaaaatctcttttctggtctgacggcgcttactgctgaattcactgtcggcgaaggtaagttgatgactcatgatgaaccctgttctatggctccagatgacaaacatgatctcatatcagggacttgttcgcaccttccttagtacttcccccaataattggctggtgtttatgcaaaatggtcaagaagtggtaattgatagcggtaaaagcgttagcctcacactgacaatggctccagcttttaaggatgaaggggaactaaccgacatgacagatattacaggcaatctgacggtcctggtggaggcaaaatgaacaatgtaaaattactgattgccggaagtgccttttttgccatgtcagcgcaagccgctgatagagtatcaattgacgttaaggtgactctggaagctgcagcttgtactccaatactaagcaacggcggagttgttaacttcggtagtcattcagtcaatagactttcaacgcagcactacacacagattggaacacgtaatattaatatgactataacttgcgaatccgctaccggcattgcgattaccgctcgtgatacacgaatggatagtatgaccaccggaaaagatagtgggggtcagagtggtgtaaaatataccttaaatggcggaggttatattagccagacaacgcgcttattcggcttagggaaaacaaaagataataaaaatatcggtagttatgccgtgttaattgatagcaacaacattagtgccagcaatggtagccagacgttagctgtatcaatagcaggtgcagatgccgtcataacagggcaaaaaagagcatggcaaacgctcaccgcttatccgcttgcagtcgatcaaagctattattacacctttgtaaaaccaggtgaaacaaccccaactcctgtaacgaacgccattataccgcttcaggtgagcgcatctatcgcgaatgatttaggcggttcagaaaaaatcgaacttgatgggaaagctgtgataagcgtagtctacttgtgataacaatgccggacaggagtactatcaggcattcgttttatacgatcggttaatgtttcaggaaagctcttcgcatatcttggggaaagtaaatgtaatacgctgttcttaattgttcagtgctcaccccccagagtatagctcattccattattcaacttagctccatataaagggacagataatggaatcgctctcagaaggaaccacagcaggctaccagcaaatccacgacggtattattcatctggtcgatagcgcccggacggaaacggtacgtagcgttaacgcgttaatgaccgcgacgtaccaggaaattggccgacgaattgtcgaatttgaacaaggtggcgaggccagggctgcgtatggtgcgcagctaatcaagcgactatcaaaggatttatgtctaaggtataagcgtgggttctctgcaaaaaacttacgccaaatgaggcttttttacctcttttttcaacatgttgaaattcaccagacaatgtctggcgaattaacaccattgggaattccgcagacaccgtctgcagaattcccatcggcaaagatttggcagacgctgtctgccaaatctttccccttgcccaggtccacctacgtccgtttactttccgttaaaaacgctgacgcccgcagcttttatgaaaaagagacgctccgctgtggctggtctgttcgccagctagagcggcaaattgcgacccagttttatgagcggacactactgtcacatgacaaatcagccatgctgcaacaacacgctcctgccgagacgcatattcttccgcaacaggcgatacgcgatccctttgtgctcgaatttctggaattgaaagatgaatattcagaatccgattttgaggaggcgctgatcaaccacctgatggatttcatgctggaacttggggatgattttgcctttgttggtcggcagcgaaggttacgcattgatgacaactggtttcgtgtcgatctgctgtttttccaccgccgtttacgctgcctgctaatcgtcgatctaaaagtgggcaaattcagctatagcgatgccggacagatgaatatgtatctcaactacgccaaagagcactggacgctaccggatgaaaatccgcccatcggtctggttctctgtgcagagaaaggagccggagaagcgcattatgctctggcaggtttgcctaacaccgttctggcaagcgaatataagatgcaactacctgatgagaaacgactcgcagatgaactcgttcgaacacaggcggtgctagaggaaggctatagacgccgttaatttcagcggtttcgaattctgcagacagtgtctgcagaatctttaaaacgaactaagttttaagccattaaatcagccttaaccttcaccacaacctttttaatctctccaggctcgccgacaacgcatcctggtttatgcggttcacctggcataaacacggcgaacattcccggttttaagatgatggcttgctcgttatcaatggtgctgcaaagctgataatcatcctcatggtggaactcttcacactgacgcgcagtgcctgccatgccaaacagaatccgttcctcaccgtttaataacagctggatatcaatgtattgctcgtgcaattccgcttttttctcgacgggcgattgagtgttaaacgtcatgacattcataaagatattgtcgccctgtaattcgtaacgacccggcgctttttcttgcggtctggcagctaatgccagcgttaacgcgtcctgtaacgcaggatgtaacccagcagacggtaatgactgtacttcacccatcatcataatttttctccctgggccaacagcgcagccccaagtaaacctgcatcatggcggtaatgcgccgccagtaaatcaacatgaaatgccgctggctcctgcgccagatacgtttccaccagcgccagatacccttctgccagaccaacgctgccaccgaccaccacgcactggcaatcagttgtggctttaatatcagcgatcagccttgcaagcgtacgtgcggagcggtgaatcagctgctgcgcctgctcgtcaccctgcccggcgcgcgtgaaaatagttttcgcatccgcgccagccaactccccctgcgctgccgctgcaatgccgcgaccagaagcaatcgcttccacgcaacctgtgcgtccacagccgcagactgggccgtgtggatcggcaagcgtatgcccgatatgccccgccagaccgccagggccggtaagcagtttgcagccgctcactacaccgccgccaacgccggtggaaacggtgataaagaccatatcggttatatcgccatccagcgcctgaaactccgcccatgctgcggcctgcgcgtcgttaatggcaatggtcggcaaattggtaagttgttccagcgttttgactaacggaaagtgtagcaatccaccaagattatgcggattaagcgccagcaagctgccgtcacggattatcccggtcgaagcgatggcaacccgctgcgcatgagcttgcaacggagagactaatgcggataaggcatcacgcaaggcttctggtgtctggctggctggcgtaggaagttcacgacgatcgcggatctgcccgtcagcgccaatcagcgcggcggcaagtttagtaccgccgatatcaatcgccagtgtggtcatagcaccgcctttttcatcgctgtgttgtaccactgacaaatgtgctcaagacgcgtgattgcagaaccgaccgtcaccgcccacgcgccgtggcgcatcgcatccgccgcctgagcaggcgtgttgtaacgcccttcggcaatcacccgacatccggcgtcgctcaacgttttcaccagcgccagatccggctcttctggcgtttcaggcgtggtatagccagaaagcgtagtgccaataatttcggctcccagcttttggcatgccaggccgtcttccggcgttgagcagtcggtcatcgccagtaaaccgtgatggtgaatacgtgccagcagcgtttcaacaggcaccggacgcgggcggtcggtgccgtcaatggcgataatgtccgcgcccgcctgcgccagcgcatcaacatcttcaatataggccgtgatgcgtaccggagaatcctccagatcgcgtttcacaattccaataatcggcacgctcaccaccgcacgcgtggcttgcagatttgccacaccttcaatgcgaatggcaaccgcgcccgcctgttctgccgctaatgccatggcggcgacgatttcgggtttatcgagcgggctgtccggaaccggctggcaggagacaatcaggccaccgttagcagcgattttttgatccagttgtgcaagtaacgacatacatcttcccttagcgaaaggcccggtacatagaccgggcaacaggattaacttttggttttgactaaatcgtttttggcgctgccaaacggcacggcaccgctgaatggtttaccgtcgatagcgtcatgagtacgcaacgcttccgggcgcaaccaacgctgaacgcgagaaggcatatccagcccaatcagcaggatcaccacgaacgtcagactgaacgagagcgatgccagcgcagtacccagatccagacgttgagcgatcaacgcgccgatgattggggccagtgcaccgcccaatgcgccaacgttgtaggtaaagcccaggcccgctgcacgctggtcggtatcgaaataaccgccaatcagttttggtaagatcccggcgatcccttgtccaagcatttgctggaagaacagtaacagaccgagcacccagacgtttgcgccgccaatcgcaaataccggaataatcagcagctgcgaggccagcaggctacaaacgtacgctttgcgggttcccagccagtcaccgaggaagccacctacgcagcatcccaccgccgcgccaaagccactaaagaacagcacattggctacagtatgcgggttataagccagatcggttttcagatacgttggcagcagcgcctgaatcggccatgagtagaggaaagcaaacaacacgaccaccatcagcattacgcccgttggccagcgtttgcctgcactctgcaccataaagctgataaagattgcggcgcataacagcccaagaacagcgacgatcgcggcattttgcaggttaccggcgaagcagaaccacagcgcagtagccgccgccagtgtcattacgatattggcaatgcgatgttcaccacggtagagaatatccaccattgtgcgtactggtgctttacctgcgtgtttctctttccagtcttccgcttccgggatgtttttacgcagccagagagcaaagatgattggcaaaatgccgataaagaacagcgcacgccagccccagaccggaaccaccaggctatagacctgagcggcaacgacggcccccacagagaagcctgaaatcaaaaaaccactggctttgttacgcagatgttttggccagctttcaatgacataggtggcgctggaaccgtattcacccgccatccccatgccgatgaccagacgagcgataaacatggtgatgtagcctggcgcaaagccgcaggccagcgtcccggccgagaagagaacgatgctggtgaccattgccagacgacgcccgtagcggtcacccatagcgccgagcatcaggccgccgaaccagcgagagataaaggctgcagagatcagacttgccgcctgcaccgtcgtcagcccgaattcaccttgtacttcggtgagtaccagggcgattaaaacgaaatcaaaaccgtcaagcagatatcccaaccaggcagcggaaaatgcgcgccattgtgcacggttgagatggcgataccacgggatattctgggttgtagtactcattgtgagtctcccgcggtgggcgatgcccacacgctttggtatgaaaattgtagggtacagatgcgtttatttcccctcacccggtaggggcgagcgaggggaaacaactcacccgcgctcttgcatcaactgctgggccagcgccttcagttctggcagatatttttcatctaccggtccaaacggtttgcggcacagcggcacagaaacgacatccatataatggaggacagttttcaggccgcggaatacgcccgttttgatcagtaaatcaatgactttattgcattcagtttgcagtttctgcgcggtctggatatcgccttctttcagcgccttaacgatcccctgatagcgccagcccatgatgttgtaggtactgccgataccaccatcagcgcccgccagcagaccagaggcgaagatttcgtcgtaaccgttatagagcacaagatcaggatgttcacgacggatctgctccatctgatagagatcgccagaggtctgtttcagcgcacctacgccaggcaatgtaacaagtgtgttgatctgatccagggtcagttttaccccactcagggctggaatgttgtacaccaccatcggcaaaccatccgccgaatcaataattgcccgatagtgatcgcagtgttcttcaaagctgaaaggatagtagaacggcgtgacggcggagacggcatcgaagccataacgtttagccgatgccgcaagttgttggctttcggcggtgctgacgcaaccgacgtgggcgatgagtttaatcttacctttcgcctcttcggcgacgatttccagtacctgttcacgctcggaaaggctttgtacaaaggcctcgccggtcgaaccacccacgtataaaccgtcgatgccctgctgaatattgaactgaaccaggcgacgcagactcgctttatccagtgcttgttgttggtcaaaaggagtcaggagtgcagccattacgccacgtaaattcgttgccataaatacctctgaagtgatgcttgtctgataaacgatatacctttatacctgttataccagatcaattaagcaacaccccatacagaaagcttataatgcgatctgcttcactaaagtggcattatttctttttgttggtggtctgaccgaaagcgtgccaggtagcagagacgctgttgagatgcgattgcaacgcacgatcggcttcgtcaggatcatgacggcggatcgcatcaacgatcgcaatatgctgttgataactaacgttgttatgttcgtgcagtgcctgatcggtaaccgttgggcgtgcggcaataagccagtcgagcagggcaacgtggatcgccatgaagattgggttaccggggatctccgccagcacgcggtggaaatcaacgtctgaacgaatgaatgccgcgttgttatccagcgactgactgttgatttccagtgcttttgccagcaaatcgatttgctcatcggtggcatgttcagccgcatagcgcaccagactggattcaaagaacagacgtaattgttcgaaatgggcaatcccaccgggatgagaaaggaaatctttcgccatgccggaaagctcaccgatgatagtgtccgcagaaggacgcgagacgcgagcgcgttcgccgttgtttatttgcaccagacctttgcgttttaacgctgccagcgcttcacgcaccgaaggacgcccgacgttaaagaacgccatcagttcgcgttcagacggtaattgttcaccttcgccaaattcacgacggcggatcatctgttccagctcttcttccaccatttcggagagttttttacgcgccagcgggcggctacgcaagttgcgaccaattgcaggtgaagaatcttcggtttgcgaatcaaatgcgttcataaggcccattctgtaaggtcagtgtgattaacatcatcagtgacatcctatcacaggattgaaagtaggggaaaatggcagggttttctctttgtgcctcatcattaccataattaacggaataattaactattgcgaaaaattaatgtaacgcagataaaaacatcccgtttgaattatttataagactattcacgagcattatgaatattatgaatgtgttcttacaaaataatcataagcgcatattttttaatgaaaaatcacctcacctacaattaaaaacacgacatccgcaccataaatagccttgcaaaaaatataacatcgttgttttcaatctgccgtttatgggattgaccgttttcttttgacacggagttcaacaatgttcggcataattatatctgtcatcgtattaattacgatgggctatttgatcctgaaaaactacaaacctcaggtggtgctggctgccgcaggtatcttcctgatgatgtgcggtgtctggttagggttcggtggtgtactcgatcccaccaaaagcagcggctacttgatcgtcgatatttataatgaaatcctgcgcatgctgtccaaccgcattgccggattggggctgtcgattatggcggtgggcggttatgcccgctacatggagcgcataggggccagtcgcgcgatggtgagcttgttaagccgcccgttaaaactcattcgctcgccgtatattattctgtcggcaacttacgtcatcggccaaatcatggcgcagtttattaccagcgcctccggtctgggtatgttgctgatggtcaccttatttccgacgctggtgagtctgggagtaagtcgtctctctgcggtggcagttatcgcaaccacgatgtccattgagtgggggattctggaaacgaactccatttttgctgcccaggtagcgggaatgaaaattgccacatacttcttccactaccagcttccggtcgcctcttgcgtcattatctcggtggcgatctcccactttttcgtgcaacgcgcttttgacaaaaaagataaaaatatcaatcacgaacaggcagagcaaaaagctctcgataatgtcccgccgctctattacgccattttacctgtgatgccgttaatcctgatgctcggctcgctgttcctcgcccacgtcgggctgatgcagtcagaactgcatctggtggtggtgatgttactgagtttgactgtgacgatgtttgttgagttcttccgcaagcataacttgcgcgaaacaatggacgatgtgcaggcgttttttgacggcatgggtacgcagtttgccaacgtggtaacgctggtggtcgcgggtgaaatatttgcgaaaggcttaacgacgattggcactgtcgatgcggttatcaggggggcggagcattctggtctgggcggtattggcgtgatgattattatggcgctggtcattgccatttgtgccattgtgatgggctctggcaatgcgccgtttatgtcatttgccagtcttattccgaatatcgcagccggactacatgtaccagcggttgtaatgattatgccgatgcattttgccacgacgctagcgcgcgcggtttcgccgattactgcggtggtggtcgttacgtcaggaattgcaggcgtttcgccttttgcggtggtgaagcggacagcgatccccatggcagtcggtttcgtggtgaatatgattgccacaatcacgctattttattaagtcattaaaaagacaaaacaggccgcctgggcctgttttgtattacttcacaacgcgtaatgccggtcgaccaccgcgtggtggctgcggaggttcatcgtcaggatgagtgtcatcatcgtgatctggcttgtcgccatcaataaccgacataacggtttcgttgtctgccgatgcctcttcatcattcatgatgctggtatcttcatcgtaggcagcttcaggctcaaacatcgtgcctgcgccattttcacgggcgtagatagccagcacggcagccagcggcacagaaacctgacgcggaatgccaccaaagcgcgcgttaaagcgcacctcatcattcgccagttccagattgccgacagcacgcggcgcaatgttgagtacgatttgcccgtcacgcgcatattccataggaacctgcacgccagggagcgtcacatccaccaccaggtgcggcgtgagctggttatccagcaaccactcatagaatgcacgcagcagatagggacgacgtggtgttagctgtgacaaatccatacagattaactccggcccagacgcatttcacgttctgcttcagttaaagaagcaaggaaagagtcacgctcaaagacgcgggtcatatagcctttcagctctttcgcacccgggccgctgaactcgatgcccagttgcggcagacgccacagcagcggagcaagatagcaatcgaccaggctgaactcatcgctcaggaagtacggcttctgaccgaagaccggcgcaatcgccagcagttcttcgcgcagttgcttacgtgcggcatctgcttcagaagctgaaccgttgatgatggtgttcatcagcgtgtaccagtctttttcgatgcgatgcatgtacagacggctttcaccgcgagctaccgggtaaacaggcatcagtggcggatgcgggaaacgctcatccagatattccataatgatgcgagattcccacagggtcagctcacgatccaccagggtcggaacgctctgattcgggttgaggtcaatcagatcctgaggcggattgtccttttccacgtgttcgatctcgaaacttacacctttctcagccagcacaatgcggacctgatggctatagatgtcagtaggaccggaaaacagcgtcattaccgaacgtttgttggcagcgacagccatgaaaacctccaggtatagtcagaatttttactgctaccagccaccaggtggccagtcagaagttgtgttacccaataaggaacgactctctttgttcgaaaatcaaacaaaaaatgagcaatacccgacatttgggcagaaaattggatgatagtttaccagattttgcgaccattgtggtgagtcgatgccggaaatggggaaaaagagatgcgctttagtctgaaatagttgacttagtcccttattggcgatgtggtttttgttttacctgtctgtcaggtggcagcaaaaagcaactttccagtttttacgctgattcagattttagctataaaaaaacccgccgaagcgggttttttcgaaaattgttttctgccggagcagaagccaattaacgtttggagaactgcggacgacgacgtgctttacgcagaccgactttcttacgttcaacctgacgagcgtcacgagtaacgaagccagctttacgcagttcagaacgcagggactcgtcgtattccatcagagcgcgggtgataccgtgacggatcgcaccagcctgaccagagataccaccacctttaacggtgatgtacaggtccagtttctcaaccatgtcgaccagttccagcggctgacgaactaccatgcgggcagtttcacgaccgaagtactgttccagagaacgttggttgattacgattttaccgttgcccggtttgatgaaaacgcgagctgcggaacttttgcggcgaccagtgccgtagtattgattttcagccattgcctataatcccgattagatgtcaagaacttgcggttgctgtgccgcgtggttgtgctcgttacccgcgtaaactttcagtttacggaacatagcacgacccagcgggccttttggcaacatgcctttaaccgcgatttcaatcacacgctcaggacggcgagcaatcatctcttcaaaggtcgcttgtttgataccaccgatgtggccggtgtggtgatagtacactttgtcagtacgcttgttgccggttacagcaactttgtcagcgttcagaacgatgatgtaatcaccggtatctacgtgcggagtgtattccgctttgtgcttaccgcgcaggcgacgagccagttcagtagccagacggcccagagttttaccggtcgcgtcaacaacataccagtcgcgttttacggtttctggtttagctgtaaaagttttcattaaaagcttacccaataaatagttacacgttggtgaacacccaaacgtcttcaattgttgaggttcacacgacaaagtccggcaaacctaccccttcgaatagcctatgccagcacacaaaaagttttgggaaaaaaactttcttgtaacgtggggtcgcaggattatagagaagtcggggtcaaagatcgacccctttttgtgatttgtgacaggttttaacccgccaaatgctcgcgcttcagatactcttcgctttgcatctcttgcagacgtgacaggcaacgctggaactcaaacttcagccgatcgccctgataaatttcatacagcggcacttctgcactcaccactaatttgacatggcgctcgtaaaactcatccaccagcgcaataaagcgccgcgcttcgctctccatcaaccgcgtcataactggtacatcaaacaacatgaccgtatgaaagagacgtgagagcgcaatatagtcatgctgactgcgggcgtcgacgcacagcgtagtaaaagagaccgccagcgtctggttctcgacgcccattgttgctaatggccgatggttgatttctaacgtcggtgaattttctcgtttcccccccgccagcgccaaccatagtttatccatttgcgcccgggtttcatcgtgaagtggcgaaagccacagatgcgcctgagtgagtgtacgcagacgataatcaacaccagcgtccacgttcattacatcacaatgctgtttaatggcatcgattgcaggcagaaaacgcgcacgttgcaggccatttcgataaagttcatccggcggaatatttgacgtcgctaccagggtaataccgcgagcgaacagggctttcatcagaccgccaagtagcatggcatcggtaatatcagaaacaaaaaattcgtcaaaacagagcacgtcagtttcggctttaaagcgatcggcaataatttccagcggatcggtctgcccctgtaaggcagttagctcttcatgcacccgcagcataaaacggtgaaagtgcaggcgctgtttccgctctcccggcaggctttgatagaaaaggtccatcagccaggttttcccgcgtcctacaccgccccacatatataagccacgcactggcgtatgctttgtgtcttcgcgtttaccccacagcttaccgacccgcgccattagcccactcgtcctgggggctggtggcgtgctattgatgagttcctgataaataatttccaggcggctgacggcctctttttgaacgtcgtcgggttgatggctgccttcattaagcgccttcaggtattgcgatgttggggtaacgctttgcatgatcttattgttattccttgaataatcggtgcgccgttgttcacggttgacgaaaaaaaggccgttctacactacgcgatatgcagtcgggattccacttctgtggaattaacggttatagtggcataatcagccgcaggcatggagcctgaagccaacaccctacggaaacaaaagacaacgggagatgttcatgacctgggaatatgcgctaattgggttagtcgtcggcatcattattggtgctgtggccatgcgttttggtaatcgtaaactacgccagcaacaggcgttgcagtacgaactggaaaagaataaagctgaactggacgagtatcgcgaagagctggttagccactttgcccgcagcgcggaattactggataccatggcgcacgactatcgccagctgtatcagcacatggcaaaaagctccagcagcctgctgccggaactgtctgctgaagcaaacccgttccgtaatcgtctggcagagtctgaagccagcaacgatcaggcaccggtgcagatgcctcgcgactattctgaaggcgcatccggcctgctgcgtactggcgcgaagcgcgactaatttatttttcgggcgcagccattgcgccctcctcttctctccctccccgactatcatttaatctggtgtctcattgttagccgtctgaaaattcaataacatcaaactgttttgaatctcttttcttatcattcaggtacgagagcaggaataatgaaaaaacaaacccagctgttgagtgcattagcgttaagtgtcgggttaactctctcggcgtcatttcaggccgtcgcgtcgattccaggccaggttgccgatcaggcccctctccccagtctggctccaatgctggaaaaagtgcttccggcagtggtgagcgtacgggtggaaggaacggccagtcagggacagaaaatcccggaagaattcaaaaagttttttggtgatgatttaccggatcaacctgcacaacccttcgaaggtttaggctccggtgtcatcatcaacgccagtaaaggctatgtgctgaccaacaaccatgtgattaatcaggcacagaaaatcagtattcagctcaatgatgggcgcgagtttgatgcaaaactgattggtagcgatgaccagagcgatatcgccctgttacaaattcaaaacccgagcaaattaacgcaaatcgctattgccgactccgataaattgcgcgtcggtgattttgccgtagcggtcggtaacccatttggccttgggcaaaccgccacctctggcattgtttccgcattaggccgcagcgggttgaatcttgaaggtctggaaaactttatccagacagatgcttccattaaccgcggtaactccggcggtgcactattaaaccttaacggtgagttaattggcatcaacactgcaatccttgcgcctggcggcgggagcgtcgggattggatttgccatccccagtaatatggcgcgaacactggcgcagcagcttatcgactttggtgaaatcaaacgcggtttgttaggcatcaaaggcaccgagatgagtgccgatatcgccaaagccttcaaccttgacgtgcagcgtggcgcgtttgtcagcgaagtgttgccaggttctggctcggcaaaagcgggcgtcaaagcgggcgatattattaccagcctcaacggcaaaccgctgaatagctttgctgagttgcgctctcgtatcgcgaccaccgagccgggcacgaaagtgaagcttggcctgctgcgtaacggcaaaccactggaagtagaagtgacgctcgataccagcacctcttcgtcggccagcgctgaaatgatcacgccagcgctggaaggtgcaacgttgagcgatggtcagctaaaagatggcggcaaaggtattaaaatcgatgaagttgtcaaaggaagcccagctgctcaggctggcttgcaaaaagacgatgtgatcattggcgtcaaccgcgatcgggtgaactcgattgctgaaatgcgtaaagtgctggcggcaaaaccggccatcatcgccctgcaaattgtacgcggcaatgaaagcatctatctgctgatgcgttaatgtcgtaaaccgggcatcaggcttacgtgtgatgtccggttaactcgtggtatgctgctgccgttcccttttttaatgacgcctccatcatgtttgtgaagctcttacgttccgttgcgattggattaattgtcggcgctattctgctggttgccatgccttcgctgcgcagccttaacccgctttccactccgcaatttgacagtaccgatgagacgcctgccagctataatctggcggttcgccgcgccgcgccagcggtggttaacgtttacaaccgtggtttgaacaccaactctcacaaccagcttgagatccgcaccctgggatccggtgtaatcatggatcaacgcggttatatcatcaccaataaacacgtcatcaacgacgccgatcagatcatcgtcgccttacaggatggacgtgtatttgaagcattgctggtgggatctgactctctaaccgatctggcggtacttaaaattaatgccactggcggtttacctaccattccaattaatgcacgtcgcgtaccgcacattggcgacgtagtactggcgatcggtaacccgtacaacctcgggcagaccattacccaggggattattagtgccacgggtcgaatcggtctgaacccgaccgggcggcaaaacttcctccaaaccgatgcttccattaaccacggtaactctggcggcgcgctggtgaactcgctgggcgaactgatgggcattaatacgctgtcgtttgataagagtaacgatggcgaaacgccggaaggtatcggctttgcgattcctttccagttagcaaccaaaattatggataagctgatccgcgatggtcgcgtgatccgcggctacattggtatcggcggacgtgagatcgcaccactgcacgcgcagggcggtggtatagatcaactgcaagggatcgtggttaatgaagtgtcacctgacggcccggcggcgaatgcgggtattcaggtcaacgatctgattatttcggtggataacaaaccggccatctctgctctggagacgatggatcaggtggcggaaattcgccctggttcggtgatccctgtagtagtgatgcgtgatgataagcagttaacgctgcaggtcaccattcaggaatatccggcaaccaattaagtcgtgcgctcaaaacaaaaaaccggagtctgtgctccggttttttattatccgctaatcaattacttattaacgaactcttcgcccagggcgatatctttcttcagcgtatccagcataccttccagcgcgttctgttcaaatgcgctcagggtaccgatagatttacgctcttccacgccgtttttacccagcagcagcggttgagagaagaaacgggcgtactgaccgtcgccttcaacgtaggcacattcgacaacgccttgttcgccctgcagtgcacgaaccagagacagaccaaaacgtgcagctgcctggcccatagacagggttgcagacccgccaccggccttcgcttcaaccacttcagtacccgcgttctggatgcgtttggtcagatcagccacttcctgctcggtaaaactaacgccaggaacctgtgacagcagcggcagaatggtaacaccagagtgaccgccaataaccggcacttcaacttcgcctggctgtttgcctttcagttccgcaacaaaggtgttggaacgaatgatatccagcgtggtaacgccgaacagtttgtttttgtcataaacaccggcttttttcagcacttcagcagcaattgcaactgtggtgttaaccgggttagtgataataccaatgcacgctttcgggcaggttttcgcaacttgctgtaccaggtttttcacgatgccggcgttaacgttaaacaggtcggaacgatccatacccggtttacgcgctacgcctgcagagataagaacgacatctgcgccttccagcgccggagtcgcatcttcaccagaaaaacctttgattttcacagcagtagggatatggctcagatcgacagccacaccgggagtcactggagcgatatcatacagagagagttctgaacctgaaggcagttgggtttttaacagtagtgcaagcgcctggccaataccgccagcagcgccgaggactgcgactttcatcctaaactccttattatattgataaactaagatatgttgctccgctgccgcgaccttaatccacaaaattgccgtttacaatgaccacatctcaagaatgtgtagtcacgcaagtttagcgtttatgcatttaattgccgtaatcaggaacctaacttacgtaattaacagtcgcttatgcattagcgcaacattccaacaggtggtgacaatataccctaccgttcagccaaaacaacatcaatttgataacaattaatttacttttaagcagaatttgcatgccgtgacgcaggcatgtttctcaataacgaaatttgataaaatcccgctctttcataacattatttcagccttcttcagggctgactgtttgcataaaaattcatctgtatgcacaataatgttgtatcaaccaccatatcgggtgacttatgcgaagctcggctaagcaagaagaactagttaaagcatttaaagcattacttaaagaagagaaatttagctcccagggcgaaatcgtcgccgcgttgcaggagcaaggctttgacaatattaatcagtctaaagtctcgcggatgttgaccaagtttggtgctgtacgtacacgcaatgccaaaatggaaatggtttactgcctgccagctgaactgggtgtaccaaccacctccagtccattgaagaatctggtgctggatatcgactacaacgatgcagttgtcgtgattcataccagccctggcgcggcgcagttaattgctcgcctgctggactcactgggcaaagcagaaggtattctgggcaccatcgctggcgatgacaccatctttaccacccctgctaacggtttcacagtcaaagacctgtacgaagcgattttagagctgttcgaccaggagctttaatctctgccccgtcgtttctgacggcggggaaaatgttgcttatccctctcaaccccctgctttcccctgcgattaatttaacgaatagtgcgttttactgcgacatgtcattcacacaatgaatacataaggtaaaaaaagcacattatgcaaaattcattatctaattgaaaaaactagaattaacgataaataaccgtatttttaattcttttttgttattaaaattcacatttttaacacttagtatcaactgaaacagttagcgcggtattaattagctcaataattagtgtatacttgattttgtgatatgggtcacgaaacaaaggcccagctaaaagattatgtcgaggtaaaaatcatgaaaatcaaaaccactgttgctgcattaagcgtactttctgttctctctttcggtgcattcgctgccgactccattgatgctgcacaagcacaaaatcgtgaagcaatcgggaccgtatccgtaagtggtgtggcgtcttcgccaatggatatgcgtgaaatgctgaacaaaaaagcggaagagaaaggcgcaacggcctaccagattactgaagctcgtagcggtgacacctggcacgctacggctgaactgtacaaataaaccctcatcgtcttgtccgacgatattgcccccggttcgggggcttttttttgcgctaatgacgaacattaaaacgcaaatgcccttccagctcttcctctgcctcatcaaacagcaatattaacgcgccaaaacggcgacgcgttttctctcccagatgaacaaattcaatctcaagtggtagcggcaggacatcgttcattaacacatcccatagtgagtcgagatcgcgtaccttatctttcgccagaccaaaggtttggctaaagtcacgataaaaatcctcctgactctcaatctcatcaaaatcaaaggtataaatattcatctgttgccaccgtcacgtttcgcggcgagttctgccgtgcatcgctaagtatagccatgaaaaaaccgacgcttttggcgtcggttttgacttaactatcggtcaacgcatgttgatacttatggagcatccccgccagccgatttaccggttccgtcacctgcggtggcgcttgccagatgcgtagcttttcctggtagatttccagttcttccagcaactggccaaagtaccgacgacgtttatcatcgctacgggcagatatcacatggtctgctgtgcggcgcatttgtcggtgaaacgccgataaatcctcgttaaccgggatcggtgcatcacgcaggcgctggtgcgcgataatcatcgtcagcgccaggcgaaatttcggcaaatcccctgggaacttattcatcagcaaaaacagctgctgataaagtgccgggaggtggttctctttacgacgtgccacattggtagtcatcgcggaaacagcggcagaaacaaactgattaagcagtacacgtccggtcctgtcgcgcgatttatcccgcaccagcaaaataacggtgaacgcgagcacacagccgacgatttgccctaatgcgctgtcgagaaactgactgaaatggaaagtcatcgggttatccagcacgataatatttatggtgctggccagtgcccccatcgagcccagtcgccgtttctgtacttctataccgaggaagaatcccagcactgccaggctaatgcacagcagcaacatgctctgttgggtattagggataatcaccaaaaagtagagcagccctaacggcagcgcggccagcgtcccgtagataaagtcgatcgccaccatgcgtggattcggcaaacgcattgccagtgacgtcactaccgcaatcatcaccattgcaccactgccggaagtccagcccgtccacagccagaaaagcgtgcccagaatgcaggaaagtgtggttcgccagaagttaaccattgcatgatgacgttcggctgactctacttttacttccggttcgccttgcaggatctcttcttcggtggcgttgatttttgtgttactgataacgccgcgcttgagaagctgataacgcgttgccgccgcgacccagctataaatggtgacaggcgtttcccgttccccggtccaggcgataactctccgcaggcgtttgagctgcttgtggacgtcctgcgcggtttctaccggcgtgtcaaaaaattcgcggaaagtatcagtgatcaattccgggcgcgtattctgaataagataagtttcgcaggattgggtaatcagcgtcagcgatagcgtattgatcgcttttaaacgtcgattggcccgcgcccagcgggaagattccatattcaggttgctgcgcatgccttgtagcgccgtggtgcgtcgcaccaggtcgccccaggctttatcgacaacttcaccatcgccatgcttgatacagagttgcattaattgatattgcgcgaccagcaaactttccagctctcgatccacttcttgtttgatcgatcgcggagaaaagagcaaatccgccataatcgcacacacaataccgataacgatctcgctacaacgttcgacggcaaactgcggcgtaagcaatggttccggctgaatggtgatcacaatgatcagcgcggtataaccggccagcccccacgcatacgagttttctattcgtaccagcgaggatatccaggtacaaaaaccggcccagatacagcacaccagaatcatcaataatggtgcgcggatcatcgcaatgatgatcaccagtccggcaatacagccaataaatgtgccgatgatgcgcaaaaagccacgatagcgaatagcgccagaatacggttcacctcccgcagcaaaggccgtaccggcggcaacaatcgccgctgtcagtaccgcccagcgtggcgtttccagctggaagtgaaagccaacaaacagcgccagtacaatggcggtcgccagttttaccgcaaagcgaatatgttggttagcaatggagaaaatacccatcgtgattaaccaaactcacgcaggcgatgggccattttacggaagaacgaatcctggctttcgtcgcgatcttgtttgccagtgaccaccactgtagcagtggtgcccgcaggccagatgttctcttgctggttgtcgagacgaatacgaaccggaacacgttgcgcaagacgcacccattcaaggttagagtctatagtcgccatccctttgtcgtcacgcgtgctgctggcgttggtgacccctgcggcaacactatcaacagtccctttcagcactttgttactgccaagcggcgtgatctctgcacgataccccggacgcaccccttccagcttagtttcttccatataggccagtacatagaaggagttctgtttcaccagcgcaaccgccgttgatcctcgagtaataaactcaccggtatagacgttgaggttggtcacccagccatctgctggcgcgcggatcaccgtgcgttcaagatccagttttgccagatcgcgggtcgcctgcgctttcgctaactgatgcagaaccgtttgtagtacgttgttggcctggtcgatctcttcgcgagacatcgcctgcacaccgagacggttacgacgtccggcctcctggcgtttctcctgtgccagtacctgataataagcaacatcggcttgcgcttcctcaagcgccttttgatagcgcggctggtcgatggtgaacagtatctgtccttttttcaccagctggttatcatgaacattcacctgggtaatgagtccagaaacgtccggcgcgatcgcaacgacgtcagcgctaaagcgcgcgtcacgcgtccagggggattcggtgtaatagacccaggcattaaaaattgcgatgaaggccagaatgactaatacgaccgtgatggccgtacgggagaattttcttattagtgttttcacttcaacctcaaacgaacagtcgcgatatcaaataaaacaagcagcaatagagcgcggtgttgaacaacgccggatgccagacaaagtcgtagatacctgttggcacaagtacccggcgcaccagccagaaaatcgccagtgataaaagcaattcaaaaaatatcggtgggaaggacagcccaaacaccacgataacgggaaacagactcatgttgaccttggttgtaaagagagagcaggcgttattattttcagcatctgtcgccgcagagaagggcatggaaagccgggcgagagcaacattgctgtagattgatatttaatatattagcgtaactgttatgctgttatctatattatgtgatctaaatcacttttaagtcagagtgaataatggaacgactaaaacgcatgtcggtgtttgccaaagtagttgaatttggctcttttaccgccgccgccagacagctacagatgagcgtttcgtccatcagtcagacggtatcaaaactggaagatgagttgcaggtaaagctgttaaaccgtagcacacgcagcattggcctgaccgaagccggtagaatttactaccagggctgccgtcgtatgcttcatgaagtgcaggatgttcatgagcaactgtatgccttcaataacacccccatcgggacgctacgcattggctgttcttcaactatggcacaaaatgttctcgccgggctgacagccaaaatgctgaaagaatacccaggtttgagcgtcaatctggttaccggaattccagcccccgacctgattgccgacggtctggatgtggtgatccgcgtcggcgcgttgcaggattccagcctgttttcccgccgtctgggcgcgatgccaatggtggtgtgcgccgcgaaaagctatctcacacaatacggcataccggaaaaacccgccgatttgagtagtcattcatggcttgaatacagcgtgcggcccgacaatgaatttgaactgatcgcaccggaagggatctcgactcgcctgatcccacaaggaagatttgtgactaatgatccgatgacgctggtgcgctggctgacggcgggtgccgggatcgcctacgtgccgctgatgtgggtgatcaacgagatcaatcgtggggagctggagatcctgctgccgcgttaccagtcagatccacgcccggtttatgcgttatataccgaaaaagataagctgccgctgaaggtacaggtcgtgatcaactcgctgacggattattttgttgaggtcggtaaattgtttcaggagatgcacgggcgcgggaaagagaagtaattcatattgtactgttacgttgtacaaacctgtgccaacgggttcccctcaccctaaccctcaccccaaaggggcgaggggaccgttcgtgcacgtagaaagattaattatccttctgaaaatagtgaaattattacgcagtaccgccaacagtcaggttatcgactttcaacgttggctggcccacgccaaccggcaaactttgcccttctttaccgcagacacccacgccgttatccagtttcaggtcgttgccaaccatcgaaatctgctgcatggtttcgataccggaaccaatcaacgttgcgcctttcaccggcttcgttactttaccgttttcaatcagatatgcttctgaagtggagaaaacgaatttgccggaggtgatatccacctgaccgccaccaaagttcggtgcatagataccgtactcaacggattcaataatttcctgcggggtcgatttacccggcagcatataggtgttggtcatacgcggcatgggcagatgggcgtaggattcacggcgaccgttgccagtcggcgtcatccccatcaaacgcgcgttgagtttatcctgcatgtagcctttcagaatgccgttctcaatcagcacgttgtactggcctggcgtaccttcgtcatcaatcgccaccgaacctcggcgatcgaccatcgtgccatcatcaaccacggtacacagttctgaagccaccagctccccgacctgtccactaaatactgaagtgccacggcggttgaagtcgccttccagaccgtgaccaaccgcttcatgcaacagcacgcccggccaacctgcgccaagtactaccggcatggtgcccgctggtgcagcaacggcagaaagattgaccagcgccatacgcactgcttcttttgcccatgcatccgcacggacttcgccgtcgagatcggcaaggaagaattcataaccaaaacgaccgccgccgccactggcaccgcgttcgcgtttgccatcttcttcgacgagaacgctcacggaaagacgcaccagcggacggacatccgccgctagcgtgccgtcggtggccgcaaccaaaattaattcatagacaccactgaggctggcagtcacttcctgtacgcgcttgtccgcttcgcgggcaaccttatcgacgcgacgcaggatatccagcttctcttcacggctcatgctttgcagcggatctaccgaggtatacaacgggctatgctctaccgcgcccagcgtctgtactttaccatcaccactatcacggacgatggtgcgcgccgcttgcgcactctgttccagcgccagcaggctgatttggtcagcgtaagcaaatccggttttttcaccgctgattgcacgcacaccaacgccctgatcgatgttgtaagaaccatctttaataatgcggtcttctaaaacccaggattcgtgatagctcgactgaaaatagagatcgccataatcaaggcgacgttcggccagttgaccgaggatcgcgaacaagtcctgatgtttcaggccgttcgccgctagcaattgttcacttaccaggttaagactcatcgtttttgctactcgttagttactgcagtagaggattttttacggctgccggatgcggcgtgaacgccctatccagcctacggttatgttccggtttgtaggcctgataagacgcacagcgtcgcatcaggcaacggctgtcggatgcggcgtaaacgccttatccgacctacggttatgttccgtttgtaggcctgataagacgcacagcgtcgcatcaggcaacggctgccggatgcggcgtaaacgccttatccgacctacggttatgttccgtttgtaggcctgataagacgcacagcgtcgcatcaggcaacggctgccggatgcggcgtgaacgccctatccgacctacggttatgttctggctcgttggcctttggcaacgattatcctatgagattggggcaattacgcgccctcgtcaaatcattgcgctttttctttacgcggttggcgcaacacttcgttgatttgcggatcgtccagcggacccgaaatgtgatagcgcaaaatggagactttgctccacagcggccccagcactttactggcggcaaacactgccgcgccaacaatggggttaaccgcaaaagccgcagccacgcccaccgtcgcagaaatctctggtgcgacaaccgcttccatattcaggtcgcgacgtaccagatttaccgaccctttcatggcgatatccgcctccaggccatccaccagcgtgtcgtcggtgtgcataacgccgtctttaatccacgcggtgctgcgaatggagtcaaaatagaacccttcgccaaaagtgtctctgaaatcaaaacgcagcttacgcatcagggcatctacgctcaataagcgcagcaattgcccggcatgtccggtattgatttcggtaatttcgcctttacccagttgagtatgaatgatgccattcaacgtcgcttcatctggctgccagggtgctttgcgccagtgtaaatcgtaatccacattaaatgacgactggcgtatgggcgtcgtgacaccaaaaaattctgcggcggcatcaattttctgcccgcgcagttttcctttcagcgaggtacgttcattccccggattattaacccattcaccatcggcagtaagccgcgagaaaccagtatcaatcagtccattggtcagcgttaacgtatcgccagaaatggtgatatcactgtcaatgcgaccgaatttttgcccccagaaccagcactctgtgcatcgtatttgggcgtccggccagccacggaagttaatgcgctccgttgtcgggaaaggtgatgacggcgttgaatcaccacgagttttcgccacgctcgggttgtaataaagatatttgatattcgccagccacggcgcgttattacgcatcgctagcgtggcgttgatttcacgcccttgcgcttcaaccagggtgccatttgccgtcggttgcgaaacaatactcaggttattccattgctgatttcccagtgacaacataggcgtacgtaacgttatgtgttgtgggaaactcgctgcaccaccgacactctccgcagcgcctttctggaacagggccagccactcggcaccattcatcggcggcatattgagttcaacgccactttgttccggcaacggcgggagcgttttactgtctgccgcccaaatagcacgatcgagcgtcagcttttgaccgagcaaccagcggctattgaaatgattatccgcaccagcctgtccggttaattcaaagctgttgagattgccatcaaccttaacgtttaccgctagtggttcacccgcaggtttggctaacggtgaaggtaagtgactgctcacattctttagatcgccgttcagctctatgttataggtcgcaccagcatgataaggcagatcaatgcccactttaccatcccacgccacgctgccactcaatgcttcgttcaccgcttcaggcagaacgccggttttcgccggttgccagttaccgttgaggtttaccgctacctggtaggcttttgccccttctttggtggaaaaatccacgttcaacggctgattaaaccagcttgctgtcagtggttcactttgcagatcgctattgataaagctgaatttaccgctcaaatttttcagggtgctgtcgagtggtttgataaacagactgttattacgcagcgtcacttcacctttcgcggttaccagttcgccgttcagcgggatatcaagatgtaagcgagcattcacatcgccgtcgagctggagttcttgcagggtcgcacccagagaatctttcagcggtgtctcatcaaagtaagggccaacggctttacccggacctttaatgtcagcgtcaatcagcagtttttcttttgagtagtcagggatcactgcggtaagattactcgcgcgcacgccgcccagattaacgccatcggttttcatccataaaccgtcgttaataaagtccagttcaatatcaaggttagttaatgcaggccagtccggctggaaggcaaacttcgcgttgcgcagcggcaccagcacttcaaactgaccttcgttgtgtttataggggaagagttgcggattgccaccataaaccagcgtcgcgttatccgcttcaccgccctgaatcgcgccacttaagtaatcaaccaggtctttacccatcaagttttccgggaaatagcgccaggcttgtgaaccatcatcggtactgatgccagccagaatacccagccagggttcatcgttagcaggttgcaggtaacgaaaaccgccgcgcgcatggacggctttggctttaacgtcaatattacgcccatccagctggaaacctttgttattgttcagccagcttatagttgcctggccgtcggcgatttctagtggcgcacggaataccgtttcgtaaggcatctttgcctgcttcatcgacgcggtaagcaaaccattttcaacgctgccggaaagcgtcccggagaagtgttccgcacccggtaataatttccattgcttccaggccagatcgctccacgatgcctgaaaacgggtcttgtctgccgcctgaagcgggatatccagcgccagagtgttaatcttgccgctcggttgtgtggagcgccaaacatcacccagtgcaggtgaaagtttcgcggccagcgggcgtatgccctccaggcctgccagctccagattactggcgcgaatccggagttcgtcactgcgtttattgtctttgccgccaacgtcctgttccggtatccaggccagcgtcaatgctccgctcggccagggtttgccgtccatcgtgatccgtgtatcgggaatagagaactgccagcccggattttcacgcgtaatatgcgcggtcagattatccaccgacagcgtatgcgtttgcttctcgcccaaccagctggcaccgccctgtttcagccagacgtcaccgccggttacatcgcctttgtcgatcgtcatccagccttcaagggagaactgtgccgtttccagcgcaatattgtcctgcatccatttaccgagccacggcttcaggtcgatgtcatccgcctggagccagacgcgaccattgcttaacaacccctcatcatcgcgcaaatccatgcgcacctgcatcacgccgtgctgtccggtaaggctggagaggcttaccaggccttccgcacggtgtcgacgtggatcgttcagccaggtgagttgtgggatcgccagctcggcgcgctgaccggatggcgtcaggaaactgacttcactgtcgcgaagatcgaaatggtcaaattgacgaagaaacagatcgctgatgtgactggcttccagactgtcatcactaccaccgctggtgataggagtgttggtgcgaaagcgcagctgccagaaagtgaggtcgcgaaactgccagcgcatatgtaacaggctctgccagacatccagcgccagagtaacgcgtttaaccgaaaattcgccgccatcttttagttctgcacggatgtcgtgtgcttcaagcgtcgggccaaaattctgccagctggctgagagctgactggcttctaccggcatgccagtcgcggattctattttgttgaggatttccggacgccaggcgtcaagatgcggtaaagcaatacgcaggccgctaaccagcagggcagcgatcacaacgagcgcggctccagtaagcagtaaaatccccggcaatcgcctcacccgtcactccttgtctgctaaaaatgtgactcaaaaaccctttgccggatggcggcccagcatctgtttacatcattacgacgtcaaactgctcctggttatagagcggttcaatttgtactttaacctgtttgccaacgaaaatttccacttccgccagcgagtgtgactcttcgcctttcaaggcttcagctactgccggagaagcatagaccaggaaacggtcggagtcgtaagcatggtggacacgaacaatctcgcgcatgatttcatagcataccgtttccacggttttcaccgttccgcgaccgtggcaggttgggcattcgttacacagtacgtgctcaatgctttcgcgggtgcgtttacgcgtcatctccaccagccccagcgccgaaaaaccattaacgctggttttcacccggtctttgctcaacgcctgctccagcgagtgcagcactcggcggcggtgatcttcattattcatatcgatgaaatcaataatgataatcccgcccagattacgcaaccgtaactggcgagcgatagcctgcgtcgcttcaatattggtattgaaaatggtgtcgtccagattgcgatgaccgacaaacgctccggtattgatgtccacggtggtcatcgcttcggtctggtcgataatgagataaccaccggatttcagttctactttgcgttccagcgctcgctggatttcgttttcgacatcaaagagatcgaaaatcggctggcgtcctgtgtaatgctccagcttgcttgtcatctcgggaatgtactccgaggtgaactcaagtaacgcttcgtaagtcaggcgtgagtcaacgcgaatgcggtccagttcggcatcggcgaaatcacgcagaacacgctgcgccagcgccagttcgccgtacagctgataacgggtctgcgggcgttttttacgctccataactttggtccagacgcgtttcagataagcggcatcggaggccagttcagcctcgccaaccccttccgctgcggtacggatgataaacccgccctgctcgtcgcaatactctgcgaccacttttttcaggcgttcacgttctgattcgctttcaatacgttgggaaaccccaacgtgagaagcccctggcataaacaccagatagcgagaagggagcgtgatatcggtggtcaggcgcgcacctttagtgccaagcggatctttcaccacctgcaccatcagatcttgcccctgacgaaccagttccgagatgtcgcgcaccgtgaattgcttttgttcttcacccgccacacattcggtgtgcggcatgatgtcggatgcatgaagaaacgcggctttatccagcccaatatctacaaaagccgcctgcatacccggaagtacacgacttacacgacccttgtagatattgcctactattccgcgtcgcgcctcacgttcaatatgaatttcctgcagaataccgccatcaatatacgccactcgcgtttccgaaggcgttacgtttactaacaattcagccgtcatgtttatcccttttctcacgcagtgcgttaaaattacttaataattcatacgtttcaaccagcggtaagccgactacggcgtgatagctgccatttatcttcctgacaaaacagccacccagcccctgaataccgtatgcacctgctttatctaacggttcatcgctggcgacatagcccgcgatgtcttcgtctgttaacgttctgaaagtcacatcggtgaccaccaggcaatcgagaatgtgctggctgtcggccaacgccactgctgtcatcacctgatgggtctgacccgataatttgcgcaacatctgcgccgcatgctctgcgtcgcgcggtttctccagcacttctccgttcaggataacgatagtatccgcacccagcaccgggagatccttcgccgtttgcgcgacacctgcccgtgctttctcgcgcgccagacgcacaacatactgctgcgcgctctcctgcggctgacgctgctcctcaatgcccgtaacaatacgttcaaaggtcacgccaagttgcgcaagtaactcctgacgacgcggagaaccggaagctaaatacagagaagtcatagaaacctttattgcactgcaaactgctgacggactttgcgcatcagcaagaaaatccacggccagagcaccccattgactacactactccagaacacttccggtctgaaagagacgttaatcactaaaaactctgcccagaaaacaataatatccaccaccagcgaaagcaacatgacgaccagcgcctgctgccataatgcgaggttgcggaaaagctggtatttcagcgccaccaggtaagcaatgatgctcatcgccaatacgcgtacgccaagcgtcgagccgctgatcagatccagtatggcacccatcacaaaacctgtgcccacatttacgcgatgaggcaaggccaggatccaatacaacaagatgagtaacacccagtttggccggaaaacaatcaggttatccggccagggcatgatttgcagcaacagcgcaatgaggaaagagagccagattacccagcgtccctggctacgatagctcgccactattgccctcccggcgcacgcgcaggcggttgagcaccactttgcggcggcgtagccctttgtggagagcgattagcagcaggctgtgtcggcgcagcaggcgcagtagctgcatttcctgtcgccggttgctgcggagtcggctgagcgatccccgttgccggttcaggtaactttggccccatcgcgtctggcgaaggcaatacctgcggcatcatctgcatcagacgttcattagcaacacgatgcacctcttccggcgtcatcgggttagcgccgttacgatctgccccccacagcagcagcagataacgcaaacgttgcagccctgcagtcggacgcgcctgaatcacagtataagcgcgctgggtatcgagttttacggaagagacaaccgcgaccggatagccttccgggaaacgaccgcccagaccggaagtcaccagcacatcaccaacacgaatatccgtattcgccggcagatgctcaagctgcaaatcatccgtacaaccgttaccggctgcaattacgcggatatcgttgcgcagcacctggattggcagcgcgtgggtcgcatcacaaatcagcagcacgcgactggtcagtttagcgacggccaccacctgaccaacaacacctttgtcgctgatgaccggctggccttcataaacgccattaacgctacctttatcgataacaacttgatcgctataaggatcgttaaccgtggagataacctgagtcaccattttctgctcatcctgacgcagcggggaacccagcagctcgcgcagacgcgcgttctcctgtttgtattgtccaagcatcagcagttcactgtttttcagcaacagttcctgacgtaacgcccggttttcaagttctaattggtcacgcgaggccagcgtctgcgatacgccatccagcaattcacgaggagcattggaaacaaagtagaaaggactgacggcggtatccatataagtacggatttgactgaacgtccccaggcggctgtcggcaataataatgccgagcgccaccagcaccgccagaataaggcgaatctgtagcgacgggccacggctaaaaattggcttcataagttatgcgtattctcgtatcagaccaggcagggtaaacagacacttcccctgcctgcatccgattactcttcgctgaacaggtcgccgccgtgcatgtcgatcatttccagcgctttgccgccaccgcgcgccacacaggtcagcgggtcttcagcaacaacgactggaatgccggtttcttccattaacaaacggtcaaggttacgcagcagtgcgccaccaccggtgagcaccatgccgcgctcggagatgtcggaagccagttccggcgggcactgttccagtgcaaccattaccgcgctcacaataccggtcagcggttcctgcagtgcttcgaggatttcattggagttcagggtaaaaccgcgtggaacaccttctgccaggttacggccacgaacttcgatttcacggacttcatcgcccggataagccgaaccgatttcgtgcttgatacgttctgcggtggcttcaccgatcagagaaccgtaattacgacgcacatagttgatgatagcttcgtcgaaacggtcaccaccaatgcgcacagaagaggagtaaaccacaccgttcaaggagataacagcaacttcagtggtaccaccaccgatatcaaccaccatagaaccggtcgcttcagaaaccggcaggccagcaccaattgcggcagccatcggttcttcaatcaggaagacttcacgggcaccagcgccctgcgcggattcacgaattgcgcggcgttcaacctgggtcgcgccaaccggcacacaaaccagaacgcgcgggcttggacgcataaagctgttgctgtgcacttgtttgatgaagtgctggagcattttttcagtcacgaagaagtcggcgataacgccgtctttcattgggcgaatggcagcaatattgcccggcgtacggcccagcatctgcttcgcgtcatgacctactgcagctacgcttttcggtgaaccggcacgatcctgacgaatggccaccacggaaggctcattcaatacgatgccttgtccttttacataaatgagggtattcgcagtacccaggtcaatggacaagtcattggaaaacatgccacgaaattttttcaacatactaagggataatcctgaaagctggggcggaaaagaaaatccgcttactttaccaaccacacgcagcagcgacaaggcgcaaaaatcatctgctacggtgaaaattagtgcagttcgtttcctttgttacaaatctctgcctgagtccagaaaggcttaatgcatcagcagcattcctcgcctgtttgcaaccgcgtaaggtcattcatctgcatatgtgctgcaacaatctggcgagcagacaagcacactcccatgagacgcagcgcgcattattctacgtgaaaacggattaaacggcaggttaaaccgagtatctttgtgaatattttttcacgttagtatcaagtggctgtgaggacgcgaaaaaatccccttgcccgcctgtaacaccgcgctgaatcagggtctgccactcgcttcgcgaacgcacgccggtggcgtaaacctgggtgctggtcccggagcaggcttccaccaggctttgaaccagcagctggttctccgttcgcttctcaatgtttctgaccagccccggatggagcttgagtaactcaacattaagttctttgatccaactggtacttaccagcgtcaaaccagcctggttgacggctacccgtacccctaaagcattcactaaacgaataacaggttgtaaacgactgatatgttgacctacatcggcctctgcaagttcaataattatgcgttttcgttgtgatttttcacattgcattaacgtatcgcgcagccaacgctgaaaacgcgggcgaatcagcgactcaacggtaacctgaatcgccagattttcctctggccagtaacgcaatagtggaataagacggctgatttgcagacggtcatactcttccgataagccaaactgcaagaccatcggcatatactccgccgagctaacctcttcattaccatcgaagatgcggcacatgagttcgcgatgatgaacctgaccttcgcgagtaaccgccggtttttgataaaggcgcgggccgccgcgactgagcatttgctcgataagcgtacgccagcgaacattaccgcgtcctttttcaggcaacgagtcatcgtaaatagcccagctattgccgccctgcaatcccgcattacgcgtggcagactctgcatgttccattacctgctcggtatcctgaccactacgccaggcgcagataccaatgtggatcatatcgtcgcgatcgagcattttattgttcggcaaggtatcaacggctttgattaactgaccggcgatgctctctgcctcttttaacgtccggtgcggtaacagcgcagcaaaatcactgcggtggtaacgcgccagcagtgcgccagggtagcgcatcataaatgtcgacagcagattcgtcagagtgaagaactgttcttcaacctggctgtgcccccaggtatcgctcaacatattgaaatccggcagacgaatcatcatcacgatcccgtgggtacctactttctcctgatcttccagtaacgttgctaactgattatcgaaaaagagtcggttattgaggccggttttcacgtcctgggcggcataagagcggatcagcgtatcaagacggctgtgttgttcgcgtgcgttctgaatttcacgaagcagcgtatccagcgcactgctggttctgggcggccattcatagatggttcccaacacattagagccacgctcaccgtttaagatacgagtagcccgggtttccagcaattcttgcccggcaagttgccgttgtaaccagcgtaccgccaggaagagcataacaatgataaagccaatcgcccccgtgagcggcgcggtggtcatcaacgaatggaaatagttgcccatcggatcctgataaaccagacgcaacgacatccccggatgctttatcaacggaacgctcagttcgcgaaacagatcgctggagccaactggacgataactaccatttctggccagggtataaacctgtttatcaccatggagcaggtctacacgaacgatatctgccgacatcattaattcggtaatttgtggccttaatacgctgaagtcattcgacacaaggtgggtatcaatcgccgtcgccaccgcctgaacgcgatgactaaacttatactgaatggcgttgtagaaacttagcgaacagcccagcaaagtcacaaaaattgttaacccggtgagcagcgtaacaaaggccgaaaatttcgtcgttaatctcatccttgtgttaactccgatagtgaggaagcgggcatactagcaaatcagatttatctcgcaatttattgcgcttcatcggctttgcttttccattagcgagtatagtcttcagaaattattttccaatccatcatgcacatgaggaccacttatgcaggcgttacttttagaacagcaggacggcaaaactctcgcatcagtacagactctggacgaaagtcgcctgccggagggcgatgtcacggtcgatgttcactggtcgagcctgaactataaagatgcgctggcgattaccggtaagggaaaaatcatccgtaattttccgatgattcctgggatcgattttgccggaactgtacgcaccagcgaagatccgcgttttcatgccggtcaggaggtgttactcactggctggggcgttggtgaaaaccactggggtgggctggcggagcaggcgcgagtgaaaggtgactggctggttgccatgccgcaagggctggacgcgcgtaaagcaatgattatcggtactgccggttttaccgccatgctgtgtgtgatggcgctggaagatgccggtgttcgcccgcaggacggggagattgtcgtgacgggtgccagtggtggcgtcggcagtaccgccgtggcgctgctgcataagttgggttatcaggtcgttgccgtttccggtcgcgaaagtacccatgaatatctgaaaagtttaggtgctagccgtgttctccctcgtgatgagtttgccgaatcccgtcctctggaaaaacaagtctgggctggggcaattgacaccgttggcgacaaagtgctggcaaaagtgctggcgcaaatgaattacggcggctgcgtggcggcctgtggtctggcgggtggttttactctgccaaccacggtcatgccatttattctgcgtaatgtccgtttgcaaggggtggattcagtaatgacgccaccagaacgccgcgcacaagcctggcagcgactggtcgccgatttaccggaatcattctatacccaggcggcaaaagagatatctctgtcagaggcaccgaactttgccgaggccatcattaataaccagatccagggtcgcacgctggtgaaggttaactaaccatttagcagggaataataagagagggaactcattttgaaatcattattcaatcggttaacgggaaaagcggttagccggacagctttcgtcgaacaccttggtcaggaagttatacaacatcatccaaactggaaagtcatgatttcgactgaccacaaattgatgcgcattgatactccactaaacagctattattgatacgcctccgtcgcctgttaggtttatgttgctttgcctgggcgacgctacgcttagccccttacttatttctggtaccatggggtgaataatctgattttgtttgactacaaattaatcactcgaacctatttaatgctgagcattgtcaatcggttaattttgcgtgctttagcattcacatctatccagacgatgcagtgaaaattgggtaatccccagcaaccgctgcgtaatgtcgtctatcttgtcgcgatcctggcatccctacattatttgtggtctgtgaagattatctcattgcagcccctcatcttcgcagggctggcttttcagcttttcaccttacgttataagaagttccgtcgatgatggcgctaatttcgtgaattgtgcggcttgttgcaaattacacggtgttgaaggttatttacatgttagctgttgattatcttccctgataagaccagtatttagctgccaattgctacgaaatcgttataatgtgcgacctcgtcctccctgacgcagtttttgcgctgcggaaaaggtgacattggcgcaacgaaggtatattttgttttttgccggaggatagcagcagatcgctgcacaatgtccgtcaagtctaacattgacactctggggcaaaatagaccggcgtcccggcctgctggaatttatcgctatgcatacagctgtcggggcatacgctttacagacggcggtgaaacgcctgtcacaatcacactaaacaaagagtacggaacccactcatggatattcgtaagattaaaaaactgatcgagctggttgaagaatcaggcatctccgaactggaaatttctgaaggcgaagagtcagtacgcattagccgtgcagctcctgccgcaagtttccctgtgatgcaacaagcttacgctgcaccaatgatgcagcagccagctcaatctaacgcagccgctccggcgaccgttccttccatggaagcgccagcagcagcggaaatcagtggtcacatcgtacgttccccgatggttggtactttctaccgcaccccaagcccggacgcaaaagcgttcatcgaagtgggtcagaaagtcaacgtgggcgataccctgtgcatcgttgaagccatgaaaatgatgaaccagatcgaagcggacaaatccggtaccgtgaaagcaattctggtcgaaagtggacaaccggtagaatttgacgagccgctggtcgtcatcgagtaacgaggcgaacatgctggataaaattgttattgccaaccgcggcgagattgcattgcgtattcttcgtgcctgtaaagaactgggcatcaagactgtcgctgtgcactccagcgcggatcgcgatctaaaacacgtattactggcagatgaaacggtctgtattggccctgctccgtcagtaaaaagttatctgaacatcccggcaatcatcagcgccgctgaaatcaccggcgcagtagcaatccatccgggttacggcttcctctccgagaacgccaactttgccgagcaggttgaacgctccggctttatcttcattggcccgaaagcagaaaccattcgcctgatgggcgacaaagtatccgcaatcgcggcgatgaaaaaagcgggcgtcccttgcgtaccgggttctgacggcccgctgggcgacgatatggataaaaaccgtgccattgctaaacgcattggttatccggtgattatcaaagcctccggcggcggcggcggtcgcggtatgcgcgtagtgcgcggcgacgctgaactggcacaatccatctccatgacccgtgcggaagcgaaagctgctttcagcaacgatatggtttacatggagaaatacctggaaaatcctcgccacgtcgagattcaggtactggctgacggtcagggcaacgctatctatctggcggaacgtgactgctccatgcaacgccgccaccagaaagtggtcgaagaagcgccagcaccgggcattaccccggaactgcgtcgctacatcggcgaacgttgcgctaaagcgtgtgttgatatcggctatcgcggtgcaggtactttcgagttcctgttcgaaaacggcgagttctatttcatcgaaatgaacacccgtattcaggtagaacacccggttacagaaatgatcaccggcgttgacctgatcaaagaacagctgcgtatcgctgccggtcaaccgctgtcgatcaagcaagaagaagttcacgttcgcggccatgcggtggaatgtcgtatcaacgccgaagatccgaacaccttcctgccaagtccgggcaaaatcacccgtttccacgcacctggcggttttggcgtacgttgggagtctcatatctacgcgggctacaccgtaccgccgtactatgactcaatgatcggtaagctgatttgctacggtgaaaaccgtgacgtggcgattgcccgcatgaagaatgcgctgcaggagctgatcatcgacggtatcaaaaccaacgttgatctgcagatccgcatcatgaatgacgagaacttccagcatggtggcactaacatccactatctggagaaaaaactcggtcttcaggaaaaataagactgctaaagcgtcaaaaggccggattttccggccttttttattactggggatcgacaacccccataaggtacaatccccgctttcttcacccatcagggacaaaaaatggacactcgttttgttcaggcccataaagaggcgcgctgggcgctggggctgacccttttgtatctggcagtttggttagtagccgcttacttatctggcgttgcccccggttttaccggctttccgcgctggtttgagatggcctgcatcctgacgccgctgctgtttattggactgtgctgggcgatggtgaaatttatctatcgcgatatcccactggaggatgacgatgcagcttgaagtaattctaccgctggtcgcctatctggtggtggtgttcggtatctcggtttatgcgatgcgtaaacggagcaccggcaccttccttaatgagtatttcctcggcagccgctctatgggcggtattgtgctggcgatgacgctcaccgcgacctatatcagtgccagttcgtttatcggcgggccaggagctgcttataaatacgggctgggctgggtattgctggcgatgattcagcttcctgcagtctggctttcactcggtattctcggcaagaagtttgcgattcttgcgcgccgctacaatgcagtgacgctgaacgatatgctgtttgcccgctaccagagtcgtcttctggtgtggctggcgagtttgagtttgctggttgcgttcgttggtgcgatgaccgtgcagtttatcggcggtgcgcgcctgctggaaaccgcggcgggtattccttatgaaaccgggctgctgatttttggtatcagcattgcgttatataccgcctttggtggctttcgcgccagcgtgctgaacgacaccatgcaagggcttgtgatgctgattggcaccgttgtgctgcttattggcgtagtacatgccgctggcggcttaagtaacgcagtacagaccttgcaaaccatcgatccgcaactggttacgccacaaggcgctgacgatattctgtcgcctgcctttatgacgtcgttctgggtactggtgtgttttggcgtgattggcctgccgcatactgcggtgcgctgtatctcttataaagacagcaaagccgtacatcgggggatcatcatcggtacgattgtggtcgcaattctgatgttcggtatgcacctggccggagcgttaggtcgggcggtgatccccgatctcaccgtaccggacctggtgatcccaacgttaatggtaaaagtgctgccaccgtttgctgccgggatcttcctggctgcaccgatggctgcgatcatgtcgacaattaacgcccaactgctgcaaagttccgctacgatcattaaagatctctatctgaatatccgtccggatcaaatgcaaaacgagacgcgtctgaagcggatgtcggcggtaattacgttagttctcggcgcgttgctgctgcttgccgcctggaagccgccagaaatgatcatctggctgaatttgttggccttcggtgggctggaagccgttttcctgtggccgctggtgctgggtctttactgggaacgcgccaacgccaaaggcgcgctaagtgcgatgatcgttggcggcgtgctgtatgccgtactcgcgacgctgaatattcagtacctgggcttccaccctatcgtgccctcgttactactaagtttgctggctttcctggtcggaaaccgtttcggtacatccgtcccgcaagctaccgttttgactactgataaataaagagttttgccatgccttggatccaactgaaactgaacaccaccggcgcgaacgcggaagatcttagcgatgcgctgatggaagcgggtgccgtttctatcacttttcaggatacccacgatacgccagtatttgaaccgctgccgggcgaaacgcgcctgtggggcgacaccgatgtgattggtctgttcgacgctgaaaccgatatgaacgacgtggtggcgattctggaaaaccatccgctgctcggcgcaggcttcgcgcataaaatcgaacaactagaagataaagactgggagcgcgaatggatggataatttccacccgatgcgctttggtgaacgactgtggatctgccctagctggcgtgatgtgccggacgaaaacgccgtcaacgtgatgttagatccagggctggcgtttggtacgggtacccatccaaccacctctctgtgcctgcaatggctcgacagcctcgatttaaccggtaaaacagtcatcgactttggctgtggttccggcattctggcgatcgcggcgctgaaactgggtgcagcaaaagccattggtattgatatcgatccgcaggcgattcaggccagccgcgataacgccgaacgtaatggcgtttctgaccgtctggaactctacttaccgaaagatcagccagaagaaatgaaagccgacgtggtggtcgctaacatccttgcaggcccattacgtgaactggcaccgttaatcagcgtcctgccggtttcaggcggtttgctgggcctttccggtattctggcaagccaggcagagagcgtttgtgaagcttatgccgatagcttcgcactggacccggtcgtggaaaaagaagagtggtgccgtattaccggtcgtaagaattaaccttcgcatcgccgtagggtgacgcggggcgaagtgcgagcaagctcacaaaaggcacgtaaatttgccgattatttacgcaaatttgcgtgccaaaattttcattcataaagaaaaattgagaacttactcaaatttctttgagtgtaaattttagtcactattttctaatatgatgatttttatgagtaattatcgcaccacgctcattttaaatgcaattctttgatccatctcagaggattggtcaaagtttggcctttcatctcgtgcaaaaaatgcgtaatatacgccgccttgcagtcacagtatggtcatttcttaactcatgcgcatcggacaatatcagctcagaaatcgcctgatcgcagcgcccatggctggcattacagacagaccttttcggacgttgtgctacgagatgggagccggattgacagtatccgagatgatgtcttctaacccacaggtttgggaaagcgacaaatctcgtttacggatggtgcacattgatgaacccggtattcgcaccgtgcaaattgctggtagcgatccgaaagaaatggcagatgcagcacgtattaacgtggaaagcggtgcccagattattgatatcaatatgggttgcccggctaaaaaagtgaatcgcaagctcgcaggttcagccctcttgcagtacccggatgtcgttaaatcgatccttaccgaggtcgtcaatgcagtggacgttcctgttaccctgaagattcgcaccggctgggcaccggaacaccgtaactgcgaagagattgcccaactggctgaagactgtggcattcaggctctgaccattcatggccgtacacgcgcctgtttgttcaatggagaagctgagtacgacagtattcgggcagttaagcagaaagtttccattccggttatcgcgaatggcgacattactgacccgcttaaagccagagctgtgctcgactatacaggggcggatgccctgatgataggccgcgcagctcagggaagaccctggatctttcgggaaatccagcattatctggacactggggagttgctgcccccgctgcctttggcagaggttaagcgcttgctttgcgcgcacgttcgggaactgcatgacttttatggtccggcaaaagggtaccgaattgcacgtaaacacgtttcctggtatctccaggaacacgctccaaatgaccagtttcggcgcacattcaacgccattgaggatgccagcgaacagctggaggcgttggaggcatacttcgaaaattttgcgtaaacagaaataaagagctgacagaactatgttcgaacaacgcgtaaattctgacgtactgaccgtttctaccgttaactctcaggatcaggtaacccaaaaacccctgcgtgactcggttaaacaggcactgaagaactattttgctcaactgaatggtcaggatgtgaatgacctctatgagctggtactggctgaagtagaacagcccctgttggacatggtgatgcaatacacccgtggtaaccagacccgtgctgcgctgatgatgggcatcaaccgtggtacgctgcgtaaaaaattgaaaaaatacggcatgaactaattcaggttagctaaatgcttgattaaaaaggcgctactcggcatggggaagcgccttttttataggtgtcacaaagggagtgaccatgagaacaggatgtgaaccgacccggtttggtaatgaagctaagaccattattcacggtgatgcgcttgccgaacttaaaaagatccccgccgaaagtgtcgatctgatctttgccgacccaccatataacatcggtaaaaattttgatggtctgatcgaagcctggaaagaagatctgtttatcgactggctgtttgaagtgattgcagagtgccaccgcgttctgaaaaagcagggcagcatgtacatcatgaacagtacggaaaacatgccctttatcgatctccagtgccgcaagctttttaccatcaaaagtcgcatcgtctggtcatatgacagttctggagtgcaggcgaaaaaacactacggctccatgtacgaacccatcctgatgatggtgaaagacgcaaagaactacacattcaacggtgatgctattctggtagaagccaaaaccggatcgcagcgcgcgttgatcgattatcgcaaaaatcctccacagccttacaatcatcaaaaagtaccgggtaacgtttgggattttccgcgcgtgcgttatttgatggatgaatatgaaaaccacccgacgcaaaaaccggaagccttactgaaacgcattattctcgcctcttccaacccaggcgatatcgttctcgacccgtttgctggtagctttactaccggtgccgtagccatcgccagcggacgaaaattcattggtattgagatcaacagcgagtacatcaaaatggggcttcgacggctggatgtcgcgtcgcattactctgcggaagaactggcgaaagtgaaaaaaagaaagaccggcaacctgtcaaaacgaagccggttaagcgaagttgaccccgatctcattacaaagtaaaggatgtgtaagcctggttttcagattattcatttcgtgtatatttcctgccagacttggttaaacatgcacaggctcaggtaatgattcgcaagtattggtggctcgtcgttttcgctgtcttcgtttttctgtttgatactttactgatgcagtggattgaactgctggcaacagaaacagacaaatgccgcaatatgaactcagttaatccactaaaactggttaactgtgacgaactgaattttcaggacagaatgtgaatttacatgacacttaattcattcgtttgatgaattaatttcgttatgttttcatctggcatgaacattcttaatacgttatcgaccagagcgggggcttgtttataaagatcataacccgccatattcattaaccagttttgaacaattccgctgaaggcaccatcaataataatcatcacaacatctaaatcgaggttatttgctacacaaccttgttgctgacacgcctgcaatacttcgcggagagtctgcggattaaagcccatcttttcgcgtatcactccctcggccagcatctcatcattaaattcacatttgtgatataagattttcagcaacgcctgctggcggggaattttggcaatatattgcaagccgacaatcaatttttcacgcaattgttgaaacgggtcatgctctaatccagccgtcaagtgttcctggattaactcccgcaatgaaggctgttgcaaccacatctcattaaacagttgagtcttgttttcgaagtgccagtagatagcgccacgcgtaacgttagcggcgtcggcaatgtcgttgagcgtcgtcttgcttacgccatgctgcgcaaactgggcgatggcagtttcaatcagttcttgccgggtcttcagagcttcggctttggttctttttgccatgattaattattcaggaaataaatatattcgacacagagtgagaaaatagcgaaggttaatctatcacctaatgtgtatttatacgagaggctaatattgagttgctataaatcgttaaataaataatatatattatttacctaagatacattcactacatcaatatatatttcaatttacgaggttttaattctgcctctttcaacccgcgtcaaaataaaacagtagaatattaatctttttttgtgtttatgtgccttgagatgcctgtattcataactattccttacatcgacgaatgataatttgtaggatagcgaactgtatttttctttctgcgagttaacgcgttgcctttttgggtaaataacgcgcttttggttttttgaggaatagtaatgacgaaacatgccaggtttttcctcctgccctcctttattctgatctccgcggctttaatcgccggttgtaacgataagggagaagagaaagctcacgtcggtgaaccgcaggttaccgttcatattgtaaaaacggccccgttagaagttaagactgaattaccaggccgcaccaatgcttatcgtatagccgaagttcgcccacaggttagcgggatcgtactgaatcgcaatttcactgaaggcagcgatgtgcaagcaggccagtccctgtaccagatcgatcccgcgacctatcaggcaaattatgacagcgcgaaaggcgaactggcgaaaagtgaagccgccgccgccatcgcgcatttgacggtaaaacgttacgttccgctcgtgggtacgaaatacatcagccagcaggagtacgaccaggccattgctgatgctcgtcaggccgatgccgccgtgattgccgcaaaagccacagtcgaaagcgctcgcatcaatcttgcttataccaaagtcactgcgccaattagcggacgtatcggcaaatcgactgtgaccgaaggcgctcttgtcactaatgggcaaacgactgaactggcgactgtccagcagctcgatcctatctacgttgatgtgacccaatccagcaacgattttatgaggctgaagcaatccgtagagcaaggaaatttgcataaggaaaacgccaccagcaacgtagagttggtcatggaaaacggtcaaacctatcccctgaaaggtacgctgcaattctccgatgtgaccgttgatgaaagcaccggctccataaccctacgtgctgtcttccctaacccgcaacatacgcttttgccgggtatgtttgtgcgtgcacggattgatgaaggcgtccaacctgacgccattcttatcccgcaacaaggcgttagccgcacaccgcgtggtgatgcaaccgtgctgattgttaacgataaaagtcaggttgaagcgcgccctgtcgttgccagtcaggcgattggcgataaatggttgattagtgaaggactgaaatctggcgatcaagtcattgtcagcggcctgcaaaaagcgcgtccgggagagcaggttaaagccactaccgatacccccgcagatactgcatcgaagtaaggtaatctgacatggcaaacttttttattcgacgaccgatatttgcatgggtgctggccattattctgatgatggcgggcgcactggcgatcctacaattgcccgtcgctcagtatccaacaattgcaccgcctgcggtttctgtttcagcaaactatccgggcgctgatgcgcagaccgtgcaggatacggtgacgcaggttatcgaacagaatatgaacggtatcgataacctgatgtatatgtcctccaccagcgattccgccggtagcgtgacaattacccttaccttccagtccgggaccgatcctgatatcgcgcaagtgcaggtgcagaacaaactccagctcgccacgccgttgctgccgcaggaggttcagcagcaggggatcagtgttgaaaagtccagtagcagctatttgatggtggcgggctttgtctctgataacccaggcaccacacaggacgatatctcggactatgtggcctctaacgttaaagatacgcttagccgtctgaatggcgtcggtgacgtacagcttttcggcgcacagtatgcgatgcgtatctggctggatgccgatctgctaaacaaatataaactgacaccggttgatgtgattaaccagttgaaggtacagaacgatcagatcgctgccggacagttgggcggaacgccagcgttaccagggcaacaattgaacgcctcgattattgctcagacgcggtttaaaaatccggaagaattcggcaaagtgaccctgcgcgtaaacagtgacggctcggtggtacgcctgaaagatgtcgcacgggttgaacttggcggtgaaaactataacgttatcgctcgtatcaacggaaaaccggcggcgggcctggggattaagctggcaaccggcgcgaatgctctcgataccgcgaaagccattaaggcaaaactggcggaattacagccattcttcccgcagggaatgaaggttctctacccttatgacaccacgccattcgtccagctttctattcacgaagtggtaaaaacgctgttcgaagccattatgctggtgttcctggtgatgtatctgttcttgcagaatatgcgagcaacgctgatccccaccattgcggtacccgtggtgttgttagggacgtttgccatcctcgccgcttttggttactccatcaacacactaacgatgttcgggatggtgcttgccatcgggctgctcgtcgatgatgcgatagtggtggtggagaacgtcgagcgcgtgatgatggaggataagctcccgccaaaagaagcgacggaaaaatcgatgtcgcaaattcagggcgcactggtgggtatcgcgatggtgctgtcagcggtatttattccgatggcattcttcggcggttctactggggcaatttatcgccagttctctatcaccatcgtttcggcaatggcgctttctgttctggtggcattgattcttacccctgcgttatgtgcaacgctgcttaaacccgtctctgctgagcatcacgaaaataagggcggtttcttcggttggtttaataccaccttcgatcatagcgttaaccactacaccaacagcgtcggcaaaatcctcggatccacaggacgatatttactgatctatgcgctgattgttgcaggaatggtggtgttgtttttacgtcttccgtcttccttcttacctgaagaggatcagggtgtctttctgaccatgattcagttacccgctggcgcgacgcaagagcggacgcaaaaagtgttggatcaagttacggattactatctgaagaacgagaaagcgaacgttgaaagtgtctttacggttaacggctttagcttcagcggccaggcacaaaacgccggtatggccttcgtcagtctgaaaccgtgggaagagcgtaatggtgacgaaaacagtgcggaagcggtaatccatcgtgccaaaatggaattgggcaagatccgcgacggttttgtcattccattcaatatgccagccattgttgaactgggcacggcaacgggtttcgactttgagttaattgatcaggctgggctgggtcacgatgccctaacccaggcccgtaaccagttgcttggtatggcggcgcaacatcctgccagcttagtcagcgtgcgccctaatggcctggaagacaccgcgcagtttaaactggaagttgaccaggaaaaggcgcaggcattaggtgtttcactttctgacatcaatcagaccatttcaacggcgctgggtgggacttacgttaacgacttcatcgaccgtggccgcgtgaaaaagttgtatgttcaggcggatgccaaattccgtatgctgccagaagatgtcgataaactttatgtccgcagcgccaacggcgaaatggtgccattctcggcctttaccacttcacattgggtgtatggctctccgcgactggaacgctacaacggtctgccgtcaatggagattcagggggaagccgcgccaggaaccagttccggcgatgccatggcgttgatggaaaaccttgcgtcaaaattacctgcgggcattggttatgactggacgggtatgtcgtatcaggaacgcttatcgggaaaccaggctcccgctctggtagcaatttcctttgtggttgttttcctgtgccttgctgcactctatgaaagctggtcaattcctgtctcggttatgttggtagtgccgttagggattgtcggcgtgctgctggcggcgacactctttaatcaaaaaaatgacgtctactttatggtgggcttgctaacgacaattggcttgtcggccaaaaacgctattttgatcgttgagttcgctaaagatctcatggagaaagagggtaaaggtgttgttgaagcgacactgatggcagtacgtatgcgtctgcgtcctatcctgatgacctctctcgcctttattctcggcgtattaccgctagctatcagtaacggtgccggcagtggcgcgcagaacgctgtgggtatcggggtaatgggaggaatggtctctgcaacgttgctggcaatcttcttcgtaccggtgttctttgtggtgatccgccgttgctttaaaggataaatcagaaacataaaggcgctttcgggtgcctttattatttccagtgaaacccataaaaattaataagatattcttctgctcactctttaaaagctttctatagttcccgctcccttcactatttttacaattcacataatttgtcattattcattccgcaagatttataacctccggtgataaaatggcattcagctcgttaataagagagttaacttattaagcgttagcgtttattactgaggtaacaccatgaaaagattaattcctgtggcattgctcaccgcattgctggcgggctgtgctcacgattcgccctgcgttccggtttatgacgatcagggtcgtctggttcacaccaatacctgtatgaaaggcacgactcaggataactgggaaacggctggggctattgccggcggggcagctgctgttgctggcctgacgatggggatcatcgctctatcgaaataactgaacagggcgcggagttccgcgctctttttaacgatacagtatctctccataagataaaatattgctatattctgctgggtaattccctgctgatttagcatgttacatcgcgttatttcgctgctttcgaaataacgcatcaatttaattttcacacttcccaccagaaatatactcacgctaacaatcattattctgcttagtaaaacacgcgtaaatattttgcgccaaaatgtggcgcatgtttcattttcgcaccattgcggggcgctgtttttattatttcctgtctacactcagcttattgcgacgcgaaatcgtgcgcaaaagctggcactacttttgcttataagaggatggccacagacaggtaaaagacgtttcccaaacgtcctataacgataattttcgcctcacaggaagcattatgaaaaagatgatgatagccacactggctgccgccagcgtgctgcttgccgttgcaaatcaggcgctgctggcgcgacgcttgatgccgttcagaaaaaaggttttgtgcaatgcgggatcagtgatggattacctgggttctcttatgccgatgctgacggtaagttttcaggtattgatgttgatatttgtcgtggtgttgccgctgctgtatttggtgacgacacgaaagtgaaatataccccgctcactgcaaaagaacgcttcaccgctttacagtcaggggaggtggatttgctctcccgtaatacgacctggacttcatctcgcgatgccgggatgggaatggcatttaccggcgtcacttattacgacggcattggcttcctgacgcacgataaagcggggctaaaaagcgcgaaagaactggatggcgctaccgtctgtattcaggcgggtactgataccgaactcaacgtcgccgactacttcaaggcaaacaatatgaagtacacaccggtgactttcgatcgctctgacgaatcagcgaaggcactggaatctggtcgctgcgatacgctggcctcggatcaatcacaactgtatgccctgcgcatcaaattaagcaacccagctgaatggattgtcttaccggaagttatctcaaaagaaccgcttggtccggtagttcgtcgtggcgatgatgaatggttctcgattgtacgctggacgcttttcgccatgctgaatgctgaagagatgggcatcaattcccagaacgtcgatgaaaaagcggctaatccagcaacgcctgatatggcacatctgctgggtaaagaaggcgattacggcaaggatctgaagctggataataaatgggcctataacatcatcaaacaggtgggtaactactcggaaatttttgagcgtaacgtaggttcagaaagcccgctgaaaattaaacgtgggcaaaataatctctggaataacggcggtattcagtacgcaccgcccgtgcgttaagtcggtgtgaggtaacgagcgtcgctacggcggcgctctcttcagcgttatgctttccgaggtttctatgtctcatcgccgctcaaccgttaaaggctcactctcttttgccaaccctacggttcgcgcctggttattccagatccttgccgttgttgctgttgtcggcattgttggttggttatttcacaacactgtaacgaatctcaataatcgtggcattacttcaggttttgcctttctggatcgcggcgctggcttcggtattgtccagcatttgatcgattaccagcagggcgacacctacggacgcgtttttattgtcggcttactcaatacgctactggtttctgcattgtgtattgtgttcgcttctgttttgggcttctttatcggtctggcgagactttcggataactggctgctacgaaagctttccacaatttatattgagatcttccgtaatattcccccgctgctgcaaatcttcttctggtactttgccgtgttgcgcaatttgcccggaccacgccaggctgtgagcgcgtttgatctggcctttttgagcaatcgtgggctttatattccgtcaccgcagctgggagacggatttattgcgtttatcctggctgttgttatggctatagtcctttctgttgggctattccgctttaataaaacataccagataaagaccggacaactgcgccgcacctggccgatcgccgcagtgttgatcattggtttgcctttactggcgcaatggctttttggcgcagcactacactgggatgtcccagccctacgaggctttaacttccgcggcgggatggttttaattcctgaactggcagccttaacgctggcactttcggtttatacatctgcatttatcgccgagattatccgcgctgggatccaggcagtgccttatggtcaacatgaagcggctcggtcactgggattacccaacccggttacgctacgccaggtcattattccccaggcattgcgggtgattattccaccgttaaccagccagtatctcaacatcgtcaaaaactcctctcttgccgccgctattggctatcccgatatggtttcgctgtttgccggcaccgtgctgaatcagacggggcaagccatcgagacgatagccatgaccatgtcggtctatctgattatcagcctgactatctcgctgctgatgaatatctataaccgccgcatcgcgatcgttgaacgctaaggagtcatgatgacaaaagtattgctgtctcatcccccgcgcccggcgagccataactcaagccgcgcgatggtgtgggtgcgaaaaaatctgttctccagctggagcaatagcctgctgactattggctgcatatggttgatgtgggaactgatcccaccgttgctgaactgggcatttttgcaggctaactgggttggctcaacgcgtgccgactgcacaaaagccggtgcctgttgggtcttcatccacgaacgatttggtcagtttatgtatgggctttacccacacgaccaacgctggcgaattaacctcgcattactgattgggcttgtgtcgatcgcaccaatgttctggaaaatactcccgcatcgcggtcgctatattgcggcctgggcggtgatttacccactgattgtctggtggctgatgtatggcggtttttttgctcttgagcgggttgaaacccggcaatggggcgggctgacgctaactttaattattgcatcagttgggattgcgggggcgctaccgtgggggatcttactggcgttaggtcgccgctcccatatgccgattgtgcgtatcttatcggtcatttttatcgaattctggcgcggcgtgccgctgattaccgttctgtttatgtcttcggtcatgctgccgttgtttatggcagaaggcaccagtatcgacaaattgatccgcgcgctggttggcgtgatcctgtttcagtcagcatatgttgcggaagtcgtgcgaggtggattacaggcgctgcctaaagggcaatatgaagcggcagagtcgctggcgttgggttactggaaaactcaggggctggttattctgccacaggcgttgaagctggtaattcctgggctggtaaataccatcatcgcactcttcaaagataccagcctggtgatcattatcgggttgttcgatcttttcagtagcgttcagcaggcaaccgttgatcccgcctggttgggtatgtcgacggaagggtatgttttcgccgcgctgatctactggatcttctgtttcagcatgtcgcgctatagccagtatctggaaaaacgttttaacaccgggcgtacaccgcattgaggacactatgagccaaattttactgcaacctgctaacgcgatgattacgctggaaaacgtcaataaatggtatggacaattccatgttttgaaaaatataaatttaaccgtgcaaccgggagaacggatcgttctgtgtggcccttcaggttccggtaaatcgacaaccattcgttgtattaatcatctggaagaacatcaacagggacggatcgtggtagatggcatcgaacttaatgaagatatccgcaatattgagcgcgtcaggcaggaagtgggaatggtctttcagcatttcaatctcttccctcatctgaccgttttacagaactgtaccctggcaccgatttgggtacgcaagatgcctaagaaagaggctgaagatctggcggtgcattacctagagcgggtgagaattgccgaacatgcgcataagtttcccggacagatttcaggtggtcagcagcaacgcgttgccattgcgcgttcgctgtgtatgaagccgaaaattatgttgtttgatgagccaacgtcggcgctcgatcctgagatggtgaaagaggtgctggatacgatgattgggctggcgcagtcgggtatgacaatgttgtgtgtaacacatgagatggggtttgcacgaaccgtcgctgaccgggtaatttttatggatcgtggggaaatagtggagcaagctgcacctgatgaattttttgcgcatcctaaatcagagcgtacgagggcatttttatcgcaggtaatccattaattgaatgttagttcgaaaagcaaaaaggccatcctttcggatggcctttcgcttgatttgatgtctggcagtttatggcgggcgtcctgcccgccaccctccgggccgttgcttcgcaacgttcaaatccgctcccggcggatttgtcctactcgggagagtgttcaccgacaaacaacagataaaacaaaaggcccagtcttccgactgagccttttgttttatttgatgtctggcagttccctactctcgcatggggagaccccacactaccatcggcgctacggcgtttcacttctgagttcggcatggggtcaggtgggaccaccgcgctactgccgccagacaaattcttttctaatctgccgaactttaacctaaaaagtggtgctgatacccagagtcgaactggggacctcacccttaccaagggtgcgctctaccaactgagccatatcagcacgctaaatttgatgcctggcagttccctactctcgcatggggagaccccacactaccatcggcgctacggcgtttcacttctgagttcggcatggggtcaggtgggaccaccgcgctacggccgccaggcaaattctgttttatcagaccgcttctgcgttctgatttaatctgtatcaggctgaaaatcttctctcatccgccaaaacagcttcggcgttgtaaggttaagcctcacggttcattagtaccggttagctcaacgcatcgctgcgcttacacacccggcctatcaacgtcgtcgtcttcaacgttccttcaggacccttaaagggtcagggagaactcatctcggggcaagtttcgtgcttagatgctttcagcacttatctcttccgcatttagctaccgggcagtgccattggcatgacaacccgaacaccagtgatgcgtccactccggtcctctcgtactaggagcagcccccctcagttctccagcgcccacggcagatagggaccgaactgtctcacgacgttctaaacccagctcgcgtaccactttaaatggcgaacagccatacccttgggacctacttcagccccaggatgtgatgagccgacatcgaggtgccaaacaccgccgtcgatatgaactcttgggcggtatcagcctgttatccccggagtaccttttatccgttgagcgatggcccttccattcagaaccaccggatcactatgacctgctttcgcacctgctcgcgccgtcacgctcgcagtcaagctggcttatgccattgcactaacctcctgatgtccgaccaggattagccaaccttcgtgctcctccgttactctttaggaggagaccgccccagtcaaactacccaccagacactgtccgcaacccggattacgggtcaacgttagaacatcaaacattaaagggtggtatttcaaggtcggctccatgcagactggcgtccacacttctaagcctcccacctatcctacacatcaaggctcaatgttcagtgtcaagctatagtaaaggttcacggggtctttccgtcttgccgcgggtacactgcatcttcacagcgagttcaatttcactgagtctcgggtggagacagcctggccatcattacgccattcgtgcaggtcggaacttacccgacaaggaatttcgctaccttaggaccgttatagttacggccgccgtttaccggggcttcgatcaagagcttcgcttgcgctaaccccatcaattaaccttccggcaccgggcaggcgtcacaccgtatacgtccactttcgtgtttgcacagtgctgtgtttttaataaacagttgcagccagctggtatcttcgactgatttcagctccacgagcaagtcgcttcacctacatatcagcgtgccttctcccgaagttacggcaccattttgcctagttccttcacccgagttctctcaagcgccttggtattctctacctgaccacctgtgtcggtttggggtacgatttgatgttacctgatgcttagaggcttttcctggaagcagggcatttgttgcttcagcaccgtagtgcctcgtcatcacgcctcagccttgattttccggatttgcctggaaaaccagcctacacgcttaaaccgggacaaccgtcgcccggccaacatagccttctccgtccccccttcgcagtaacaccaagtacaggaatattaacctgtttcccatcgactacgcctttcggcctcgccttaggggtcgactcaccctgccccgattaacgttggacaggaacccttggtcttccggcgagcgggcttttcacccgctttatcgttacttatgtcagcattcgcacttctgatacctccagcatgcctcacagcacaccttcgcaggcttacagaacgctcccctacccaacaacgcataagcgtcgctgccgcagcttcggtgcatggtttagccccgttacatcttccgcgcaggccgactcgaccagtgagctattacgctttctttaaatgatggctgcttctaagccaacatcctggctgtctgggccttcccacatcgtttcccacttaaccatgactttgggaccttagctggcggtctgggttgtttccctcttcacgacggacgttagcacccgccgtgtgtctcccgtgataacattctccggtattcgcagtttgcatcgggttggtaagtcgggatgacccccttgccgaaacagtgctctacccccggagatgaattcacgaggcgctacctaaatagctttcggggagaaccagctatctcccggtttgattggcctttcacccccagccacaagtcatccgctaatttttcaacattagtcggttcggtcctccagttagtgttacccaaccttcaacctgcccatggctagatcaccgggtttcgggtctataccctgcaacttaacgcccagttaagactcggtttcccttcggctcccctattcggttaaccttgctacagaatataagtcgctgacccattatacaaaaggtacgcagtcacacgcctaagcgtgctcccactgcttgtacgtacacggtttcaggttctttttcactcccctcgccggggttcttttcgcctttccctcacggtactggttcactatcggtcagtcaggagtatttagccttggaggatggtccccccatattcagacaggataccacgtgtcccgccctactcatcgagctcacagcatgtgcatttttgtgtacggggctgtcaccctgtatcgcgcgcctttccagacgcttccactaacacacacactgattcaggctctgggctgctccccgttcgctcgccgctactgggggaatctcggttgatttcttttcctcggggtacttagatgtttcagttcccccggttcgcctcattaacctatggattcagttaatgatagtgtgtcgaaacacactgggtttccccattcggaaatcgccggttataacggttcatatcaccttaccgacgcttatcgcagattagcacgtccttcatcgcctctgactgccagggcatccaccgtgtacgcttagtcgcttaacctcacaacccgaagatgtttcttacgattcatcatcgtgttgcgaaaatttgagagactcacgaacaactttcgttgttcagtgtttcaattttcagcttgatccagatttttaaagagcaaatatctcaaacatcacccgaagatgagttttgagatattaaggcaggtgactttcactcacaaaccagcaagtggcgtcccctaggggattcgaacccctgttaccgccgtgaaagggcggtgtcctgggcctctagacgaaggggacgtatcagtctgcttcgcaagacgccttgcttttcactttctatcagacaatctgtgtgagcactgcaaagaacgcttctttaaggtaaggaggtgatccaaccgcaggttcccctacggttaccttgttacgacttcaccccagtcatgaatcacaaagtggtaagcgccctcccgaaggttaagctacctacttcttttgcaacccactcccatggtgtgacgggcggtgtgtacaaggcccgggaacgtattcaccgtggcattctgatccacgattactagcgattccgacttcatggagtcgagttgcagactccaatccggactacgacgcactttatgaggtccgcttgctctcgcgaggtcgcttctctttgtatgcgccattgtagcacgtgtgtagccctggtcgtaagggccatgatgacttgacgtcatccccaccttcctccagtttatcactggcagtctcctttgagttcccggccggaccgctggcaacaaaggataagggttgcgctcgttgcgggacttaacccaacatttcacaacacgagctgacgacagccatgcagcacctgtctcacggttcccgaaggcacattctcatctctgaaaacttccgtggatgtcaagaccaggtaaggttcttcgcgttgcatcgaattaaaccacatgctccaccgcttgtgcgggcccccgtcaattcatttgagttttaaccttgcggccgtactccccaggcggtcgacttaacgcgttagctccggaagccacgcctcaagggcacaacctccaagtcgacatcgtttacggcgtggactaccagggtatctaatcctgtttgctccccacgctttcgcacctgagcgtcagtcttcgtccagggggccgccttcgccaccggtattcctccagatctctacgcatttcaccgctacacctggaattctacccccctctacgagactcaagcttgccagtatcagatgcagttcccaggttgagcccggggatttcacatctgacttaacaaaccgcctgcgtgcgctttacgcccagtaattccgattaacgcttgcaccctccgtattaccgcggctgctggcacggagttagccggtgcttcttctgcgggtaacgtcaatgagcaaaggtattaactttactcccttcctccccgctgaaagtactttacaacccgaaggccttcttcatacacgcggcatggctgcatcaggcttgcgcccattgtgcaatattccccactgctgcctcccgtaggagtctggaccgtgtctcagttccagtgtggctggtcatcctctcagaccagctagggatcgtcgcctaggtgagccgttaccccacctactagctaatcccatctgggcacatccgatggcaagaggcccgaaggtccccctctttggtcttgcgacgttatgcggtattagctaccgtttccagtagttatccccctccatcaggcagtttcccagacattactcacccgtccgccactcgtcagcaaagaagcaagcttcttcctgttaccgttcgacttgcatgtgttaggcctgccgccagcgttcaatctgagccatgatcaaactcttcaatttaaaagtttgatgctcaaagaattaaacttcgtaatgaattacgtgttcactcttgagacttggtattcatttttcgtcttgcgacgttaagaatccgtatcttcgagtgcccacacagattgtctgataaattgttaaagagcagttgcgacgcgctttagcgcactgtcgcgaggtggcgtatattacgctttcctctttcagagtcaaccctgaatttcaggatttttctcttcaaccgaaccggctgtttgtgtgaagtgattcacatccgccgtgtcgatggaggcgcattatagggagttctccgcaggccgcaatagaaaaattgcagaaaaatgactgactgctgcattccccagcaaaagcccgctttatacctttttacgcacagagttatccacaatcatcaatgtaatttctgtattttgcccacggtaaccacagtcaaaattgtgatcaccattgaaagagaaaaattcgcgagcgttgcgcaaacgttttcgttacaatgcgggcgaaaaataaggatgccccgttaggggcgttagctgagtttttcgcgaaaaattcagctaacgctctctgtaatagtcaaatccaggggatttaccatgcaacaacgtcgtccagtccgccgcgctctgctcagtgtttctgacaaagccggtatcgtcgaattcgcccaggcactttccgcacgcggtgtggagctgctgtctacagggggcactgcccgtctgttagcagaaaaaggtctgccggtaaccgaagtttccgattacaccggtttcccggagatgatggatggacgcgtgaagaccctgcatccgaaagtacatggtggcattctgggccgtcgcggccaggacgatgccattatggaagaacatcagatccagcctatcgatatggtggttgttaacctgtatccgttcgcccagaccgtggcccgtgaaggttgctcgctggaagatgcggttgagaacatcgatatcggcggcccaacgatggtgcgctccgccgccaagaaccataaagatgtcgcaatcgtggtgaagagcagcgactatgacgccattattaaagagatggatgacaacgaaggatcgctgacgcttgcaacccgtttcgacctcgccatcaaagccttcgaacacactgccgcctacgacagcatgattgccaactacttcggcagcatggttccggcttaccacggtgaaagcaaagaagccgccggtcgcttcccacgcacgctgaacctgaacttcattaagaagctggatatgcgttacggcgagaacagccaccagcaggctgccttctatatagaagagaatgtgaaagaagcctccgttgctaccgcaacccaggttcagggtaaagccctctcttataacaacatcgccgataccgatgcggcgctggagtgcgtgaaagagttcgccgagccggcatgtgtgattgtgaagcacgccaacccttgcggcgtggctatcggcaattccattcttgatgcttacgatcgcgcgtacaaaaccgacccaacctccgcattcggcggcatcattgcctttaaccgcgagctggatgcggaaaccgcacaggccatcatttctcgtcagtttgtcgaagtgattattgcgccgtccgccagcgaagaagccctgaaaatcaccgccgccaaacagaacgtacgcgttctgacctgcggtcagtggggcgagcgtgttccgggcctcgatttcaaacgcgtgaacggcggtctgctggttcaggatcgtgacctggggatggtcggtgcggaagaactgcgcgtggtgaccaaacgtcagccgagcgaacaggaactgcgtgatgcgctgttctgctggaaggtggcgaagtttgtgaaatccaacgctatcgtctatgccaaaaacaatatgactatcggcattggcgcgggccagatgagccgcgtgtactccgcaaaaatcgccggtattaaagcggccgatgaaggcctggaagtgaaaggttcctcgatggcttctgacgcgttcttcccgttccgcgacggtattgatgccgccgccgctgcgggcgtgacctgcgtaatccagcctggcggttctatccgtgatgacgaagtgattgccgccgccgacgagcacggtattgcgatgctcttcaccgacatgcgccacttccgccattaatggagcaatagatgaaagtattagtgattggtaacggcgggcgcgagcacgcgctggcctggaaagcggcccagtcgccgctggttgagactgtttttgttgctccgggtaatgcaggcactgcactggaacccgcgctgcaaaacgttgctattggcgtgaccgatatcccggcgctgttggatttcgcacaaaacgaaaagattgatctgaccatcgtcggcccggaagcgccgctggtgaaaggcgtggtcgataccttccgcgccgccgggctgaaaatcttcggcccaaccgcaggtgcggcccaactggaaggctcaaaagcgtttaccaaagatttcctggcccgccataagatccctacggcggaataccagaacttcaccgaggtagaacctgcgctggcgtatctgcgtgagaaaggcgcgccaatcgtcattaaagcggacggtctggctgccgggaaaggcgttatcgtggcgatgacgctggaagaagcggaagcggctgttcacgatatgctggcgggcaacgcttttggcgacgcgggtcatcgcatcgttatcgaagagttcctcgatggcgaagaagcgagctttatcgtgatggtggacggcgagcatgtgctgccgatggctaccagccaggatcacaaacgcgtaggcgataaagataccggaccaaacaccggcgggatgggcgcttactcccccgcgccggtagtaaccgatgacgttcatcagcgcaccatggaacgtattatctggccaaccgtgaaaggcatggcggcggaaggcaacacctacaccggttttctctacgcgggcctgatgatcgacaaacagggcaatccgaaggttattgaatttaactgccgctttggcgatccggaaacccagccgattatgctgcgcatgaagtccgatctggttgagctctgcctggcggcctgtgaaagcaaactggacgagaaaacgtccgagtgggatgaacgcgcttctctcggcgtggtgatggctgcgggtggatatccgggtgattaccgcaccggtgacgtgatccacggcctgccgctggaagaagtggcaggcggcaaagtgttccacgcgggcacaaaactggcggatgacgagcaggtagtgaccaacggcgggcgcgtactgtgcgtcaccgcgctgggtcataccgtggcagaagcgcagaaacgcgcctatgccttaatgaccgatatccactgggacgactgcttctgccggaaagatatcggctggcgcgctatcgaacgcgagcagaactaacgcgacagttttgccaatagcgttttgcgcgtgatccctaactgacgggcggcttcggttttgttgccgcccgttttctccagcgccgccagaatcacctctttttccacttccaccaacggctgaatatcctgactttgtcccagcgggatcggcgtactggcaatcgccagcggcagctcgcgttcggaaatatattccccggtcagcagcaccactgcccgttccaccgcgttttccagctcacgaatatttcccggccagtcgtaatgaatcaacagatccatcgcctggggcgtaaaaccttttaccgccttgcgattacgctcggcaaagcgctgcagaaaatggccagccagcagagggatatcttcccgccgttgccgcagcgatggtacttcaatcgccaccacattcaggcgatagtagagatcctggcgaaaacgcccggcattcacctctgcggcaagatcgcgatgggtcgccgcaatcagccggacatcaaccgagataatctggttgctaccgacacgctgaacttcgcgctcctgaatcgcacgcagcagacgcacctgcatcatcggcgagatatcgccaatttcatcgagaaacagcgtgccgccgtccgcctcaacaaagcgcccttcccggcgtttatcggctccagtaaacgcccctttttcgtgaccgaacaattcagattccagcaaggattcgttgagtgccgcacagttgagcgttaccagcggtttttcgctacgtgcgctactggcgtgaatcgccctggcgaccagctctttaccggtgccggaatcgccgtggatcagtaccgtggcttccgatggcgcgacgagggcgatttcactgagcaggtgttgcatcgccgggcttttaccgaccataccgaactggctggcagtcaccgcaggtgtttcagcatcaatactgtgcgtatgcgcgagcgctttttccagcgtcgcctgtaggttatcgaaatccagcggcttgatgagataatccagcgccccagttttcagtgcctctaccgccgtctcgacgctggagtacgcagtcataatcagcaccggaattgccgggtttaacgctttgatctctttcagcgtggcgatgccgtccatctccgccattcgcacatcgcaaagcacaagatcaaaaacctgttcccgcacctgctccaacgcctgtcgcccgctgttcgccagcgcgacgttatagccccagccgcgcagtaaagcctgcaaaatagtgcagtggctaatgtcatcatccaccaccagaatatcgatattatcgtgcgtcatccttgtgggtccttacgcgtaatattgaccggaagccagagggtgaacgttgagccttttccctcctggcttgcgacctgaattgtaccaccgtgttgttcaacaatattatgcacgaccgccagccccaatccggtgccttcggctttagtggtgaagtacggagtgaagatggcatcaagctgatctgccgcaattcccttaccgctgtcggtaacgctgattttcacgcccgcgccgctttcgctggccgtcacgctaatcacgccatgctgaccaatcgcctgaatagcattgagatagagattcaacaggacctgagtcagcctgtccgggtcggcctgaatttccggtaatgtgtcgttggcggtaaagcgtaactggatctcccggctgtttgcatcctgacttaccagctgtaatgagtggttaatcagcgtgttgagatccaccgcctgcaaagccagatgcgttggcttaaccagttccagcaactcgcttaccacgcggtttaaacggtcggcctctttcgccatcacctgcgccagttgatgcgcttctccccctgcaggcgcgcgctcggcaaagtatttcgccagtcctttaatcgaggaaagtgggttacggatttcgtgggcaacgcctgccgcaagatgccccagcgccaccagcttctctttgcgcttcatttcatcttgtagaagctggcgcgagcgcagatagcggcgataccagaagaatgacaatacgcttgccagcaagaccgtcgccagggcgaagaggataatcagggtattgcgcttttccccactctgggttgcaaccagatcactggcatcaacggcgataaaaatagcctgttgtgcatctacttgtggcacagctttgccgttacagcgcggcatattgtgcattccatgccgccagggcgctgacattggctggaacaaacgatagacctcaagtgcaggcgtagtttccgttttcccaagcagccgccagcgggagttttcctctggctttaatttctgcatttcatccggcgaatagagcgcacgcccgaccttatcggggtcgctatgaagaataatgatgccctgcgcatcggtgactgcgaaccacaacactcccggctgtcccgccatctcttccagaagcgcctgttgctgtacatggtgcattcgcatccccatccctacgcggcttcccgactccagagcgcggataagcacattacctttttccagtaatgcctggcggtctgcctcgcttgcccgcccataatcacgaatcacagttaccgcaaacaatcccaccagcccaacaatgaccacggggaggatcgcgcttaaccatttagctaaggagtctttagaacgttgcataaaacgcatcttcttctttgcctgctcatccctttctgacagcagaaatcatgccatcttttatcagcgcttaccctgcgctgtaacacaaaggcttaagtttcaatgagtaaaaatgactcgctacccgcagcaggcgagtcatttttactcgtttatcatgccagattacccgtcatatcagcgtttcatcgttggcacggaagatgcaatacccgaagtaagacaaccactggaggattaaccatgaaacggaacacgaaaattgccctggtaatgatggcgctttcagcaatggcgatgggatcgacatctgcatttgctcacggcggacacggtatgtggcagcaaaatgccgcgcctttgaccagcgaacaacagacagcgtggcagaaaatccataatgacttttacgctcaaagcagcgcactgcaacagcaactggtgacgaagcgttatgaatacaatgccctgttagccgcgaacccaccggatagcagcaaaattaacgcggtcgccaaagagatggagaatttgcgtcagtcgttagatgagttacgggtgaaacgagatatcgcgatggctgaagcgggtattccgcgcggagccggaatgggcatgggctacggcggctgcggtggtggcggtcatatgggtatgggccactggtaaatcagaacgttttctcgttgggttgccagcgacagaaatcagagtttgccactaacagtaattgcgaaccttcgggcgcttccagccatgccacgctgacatcaacagaagagcggctctggcggcgctcgatatgcgctatcgcctgcgaatctaaatcaggtttaatggtttgcccttcgcaggtggtcacggtctgttccatcgcatgccagcgcccctggcgcagcacgactctcccctgacgtaaggcatcgctaatctggcggatctgatcagcacgataacggtataaatcgatttggtcgttagaaagctgctgcttttccccatcggattcacgttgcataaagctcagatcaccgcgatcgtcaaaacgcgcgcgaatattcaccggcggtttgctgtaaacattgatattgatgagcgtgaggttatcgccctgccagcgatactctcgcgtcgtggtatcgccactgcgccacgggctaaacacggcaagcagatgcacattatcgccgctgtcttttcgccagatgcgtaccgcgccctggtcttcagcaaatccactggcggtaaagggaggaagtgaagagttatgactacaggcagtgagaagcagagcgccagccagcatcaatgatcgacgccagaaagacaaaaggggtgaaaccaccccttcgttaaaactgttcactgccacgcaatcttacttaactgcgtctttcagtgccttgccagaaacaaatgccggtacgttagctgcggcaattttgatttctttaccggtctgcgggttgcggccagtacgctcagcgcggtggttcactttgaaggtaccgaaaccaaccagttgtacagcatcgccttctttcagagactcagtaattgcagccagagtggactccagagcagctttagcctgggttttggacagttctgctttctctgcaattacatcaatcagttgagtcttgttcataagttatccttacaatgtgtttatcgcttgctaagcatcgagtgcgacggaaatgccagaatagcactctcctgcatacacgcaccgatagccactttttttcgccccccaaatgtagaccagacggggggcgaaagggaagactccaggtacgacaaatcaggcgttaaatcacgttttctggtcttattgctgaaaaattataccaatattgctctcacccgcctcacgcaggtctgccctaaggccttttatcagctcgatatcgcgttcttcgcactcagctaaaagtcggaatatttcccactgaatgtcccattcttgctctacagctgggttttctttaagctcttcatcgctcatttcgcgaccagcctgagtcatttccagcatcgcaacggtcgtgatggaggtcttactcacttccaccgcgtgttcgagcgtttcaccactcaaacgcgaatggaccagttcacttaacgccacgcaggcatcgattgccggataaacgccgtacagatcgaaatcgtcggctgaaggaatcgcttcttcaaatttctccagttggctgtcgaaatttacttttgcgtctttaacggtcagcgtttcccagatgagatcgagaatgcgacggtaaatttgcccatcaccaaaaccggtttgctggcagaacatggcgtaattggggtacatgcgttcgcataagcaagccatgaaagtgacatgctgccagctttccaggcgctccagacgcagatgaattgggttttgtaacatgttgagttctcaaatacggaaattatccgcagtttacctgaattagggctgatttgctgtatagcgcacgaacgccggacgttccgaggccaccgcgtccgcccagcgcgttggctccggcagacgatagcctttcatgcagcgttgtacccacgccagcgcgctgtccacgctgacccgatggccggtagcgataaacaacgggttacagcgcgctttgctgcgccagacccaggccagctgctcgcctttatccatcagtggggccagcgcgcccggttcgctggagagcggttcgaatttaccgcagagccgttttttcgccacgccaatggtcggcacatccaccaataagccaaaatggctggcgacgccaagacggcgaggatgcgagatcccatgaccatcgacaaacactaaatccggcttttgcgacagcatctcccacgctgccagcagcgcaggatattcgcggaaggaaagaaaacctggaatgtaaggcatggtggtggcgatgcgggcaactttatactcgaccagctcaagcgagggatatttcagcagcaccatcgccgctcgcgtcacttctccgccctgctcaaacccgacatcggctccggcgatcagatccggtggatctttatcgagtcgatcctcgcggatcacagaagaagccagttcgatttgttgagcgcgtaatgacgcgagatccataatcactccttagcggtgatactgttcagacagtcgatgcactgcctccacgaacacgccagcatgttctggcggcacatcctgatgaatgccgtgaccaaggttaaagacatgaccttcgccgtgaccgaaacctgcaagtatagtcgctacttcttcttcaatgcgggcaggcggcgcgtacagcatcgacggatccatattaccctgcaacgcgactttattgcccacacggcggcgcgcatcggcgatgtccgttgtccagtcgaggcccagcgcatcgcaaccggtttctgccatggcttccagccactgtccgccgcctttggtaaacagcgtgaccggtacgcggcgaccgtcgttttcacgcagtaaaccatcaacaattttatgcatgtaatagagcgagaactgttgataatcgcgcccggtaagcacgccgccccaggtgtcgaaaatcatcactgcctgagcaccggctttaatctgcgcattcagatacaaagtgacgcttttcgccagtttatcgagcagagcgtgcagcgcctgcggatcggcatacatcatttttttgatcacggtgaaggctttgctgctgccgccttccaccatgtaggtcgccagcgtccacgggctgccggaaaaaccaatcagcggcacttcgcctttcagttcgcgacgaatggtacgcaccgcgttcatcacgtaacccagttcatcttccgggtccggaattggcagtttatcgacgtcagctttgcaggtgactggcgaggtaaaacgcggaccttctccggcttcaaaatagagccctaaccccatcgcgtccggcacggtgaggatatcggaaaagaggatcgccgcatccagcgggtagcgacgcagcggttgcaaagtcacttcgcacgccagctcggcgtttttgcacagcgacataaaatcgcctgcctgggcgcgcgtggctttatattccggtagatagcgacccgcctggcgcatcatccatactggagtgacatcaacgggctggcgcagcagcgcccgcagataacgatcgtttttaagttcggtcattttggctgttccttagtgcgtcaggcggtcagtgtatcatcactcatactctgcccgacacatcgccaccgtatcttctatcagacggcgcgctacggtgccgggcggcgggagtaacggcaaatcgtcatagcgataccagttcgcctcgagcaattctttcgggtcgatcacgatgtcgccgctgtcatattccgccataaacgcggtcattaaagactgaggaaacggccacggctgagaagtcacgtaacgcaagtttttaactttaattccgctctcttccatcacttcccgcgcgactgcctgctcgagggtttcgcccacttcgacgaatccggcaagtactgtatggacaccgttacgatggcgggtatgctgggcgaggaggatcgaatcatcgcgacggatggcaacaataatgcagggggcgatttgcgggtagtaacgctcacggcaatggctgcacagcatcgcccattcggttttgctcggatacatttcatgcccgcagtaaccacagtatttatgcgatcggtaaaactccgccagttgtacgcctcgtccggccagttgaaacagcccaacatcgagatcaatgacctgacgtaccgaccccatatcgtgacgccgctgctgttgtactaaccaaacaggttccccctgccattcgccgatttgtagtgcgcgctgacccacaagatcgaaatttgccgcttcgccatatggcaattctcccttcggcaaccataatttttgttcatggctgacgacccaccagccgtgatctaatttttcaattatacgatccatagctcttgcactacctttgcatcactggcatgtttaacatggtttttacatttctcactgagcagtttttgaatacaaacttgcggagtcaatcatgcttaaccagctcgataacctgacggagcgcgtcagaggaagtaacaaactggttgatcgctggctacatgtacgtaagcatctgctcgtggcttactacaatctggttggcattaagcctggcaaagaatcgtacatgaggctaaacgaaaaagcccttgatgatttttgtcagagcctggtcgattacttgtctgccggacatttcagtatttatgagcgcattcttcataagctggaaggcaacgggcaactcgcgcgcgccgcgaagatttggccgcaactcgaagccaatactcaacagattatggattactacgattccagtctggaaaccgccatcgatcatgataattaccttgagtttcaacaggttttatctgacatcggcgaggcgctggaagcgcgctttgtgctggaagataagctgattctgctggtgcttgacgccgcccgcgtcaaacatcctgcttgagttctgcgctgttaacgcgtaatttacattcaatgccccatttgcggggctaatttcttgtcggagtgccttaactggctgagaccgtttattcgggatccgcggaacctgatcaggctaatacctgcgaagggaacaagagttaatctgctatcgcatcgcccctgcggcgatcgtctcttgcttcatccgtcgtctgacaagccacgtccttaactttttggaatgagctatgtctgcaacaaaactgacccgccgcgaacaacgcgcccgggcccaacattttatcgacaccctggaaggcaccgcctttcccaactcaaaacgcatttatatcactggcacacaccccggcgtgcgcgtgccgatgcgtgagatccagcttagcccgacgctaattggcggtagcaaagaacagccgcagtacgaagaaaacgaagcgattccggtctacgacacctccggcccgtatggtgatccgcagattgccattaacgtgcagcaagggctggcaaaactacgccagccgtggatcgatgcgcgcggcgataccgaagaacttaccgtgcgcagttccgattacactaaagcgcggctggcagatgatggcctcgacgaactgcgttttagcggcgtactaacaccaaaacgcgccaaagcaggacgccgtgtcacccaactgcactacgcccgccagggcatcatcacgccggaaatggaattcatcgccatccgcgagaatatgggccgcgagcgcatccgtagcgaggttttacgccaccagcatccgggaatgagctttggcgcacatctgccggaaaatatcactgcggaatttgtccgtgatgaagttgctgccggacgtgcgattatcccggccaacattaatcatccggaatcggagccgatgattattggtcgcaatttcctggtaaaagttaacgccaatatcggcaactcggcggtcacctcttccatcgaagaagaagtggaaaagctggtatggtccacgcgctggggagcggatacggtgatggatctctccaccggtcgctatattcacgaaacccgcgagtggattttgcgtaacagcccggtgccgatcggtacagtgccgatctaccaggcgctggagaaggttaacgggatcgccgaagatcttacctgggaagcgttccgcgacacgctgctggaacaggccgagcaaggtgtggattacttcactatccatgcgggcgtactgctgcgctatgtgccgatgaccgcgaaacgcctgaccggtatcgtctctcgcggcggttcgattatggcgaaatggtgcctctcccatcatcaggaaaatttcctctatcaacacttccgcgaaatttgtgaaatctgtgccgcttatgacgtttcgctgtcgctgggcgacggtctgcgccccggttctattcaggacgccaacgatgaagcgcagtttgccgagctgcatacgctgggcgaactgaccaaaattgcctgggaatatgacgtgcaggtgatgattgaaggcccaggccacgtgccgatgcagatgatccgccgcaatatgaccgaggagttagagcactgccacgaagcgccgttttacactctggggccgctaactaccgatattgcgccgggctatgaccacttcacgtcggggattggtgcggcgatgattggctggtttggctgcgcgatgctctgttacgtaacgccaaaagagcatctgggtctgcccaataaagaagatgttaagcaggggcttatcacctataagattgctgcccacgccgctgacctggcgaaagggcatccgggcgcgcaaattcgcgataacgccatgtcgaaagcccgcttcgaatttcgctgggaagaccagtttaatctggccctcgacccgtttaccgcccgcgcttatcacgatgaaaccctgccgcaagagtcaggtaaagtcgcccatttttgctccatgtgtgggccgaaattctgctcgatgaaaatcagccaggaagtgcgtgattacgccgccacgcaaactattgaaatgggaatggcggatatgtcggagaacttccgtgccagaggcggagaaatctacctgcgtaaggaggaagcgtgatgtatcagcctgattttcctcctgtaccttttcgttcaggactgtacccggtggtggacagcgtacagtggatcgaacgtctgttggatgcaggcgtacgtactctccagctacgcatcaaagatcggcgcgatgaagaggtggaagccgatgtcgtggcggcaattgcgctgggccgccgctataacgcgcgattgtttatcaacgattactggcggctggcgatcaagcatcaggcgtatggcgtccatttggggcaggaagatttgcaagccaccgatctcaatgccatccgcgcggcaggcctgcggctgggcgtttcgacacatgacgatatggaaatcgacgtcgcgctggcagcacgcccctcttatatcgcgctgggacatgtgttcccgacgcaaaccaaacagatgccttctgcaccgcaggggctggaacagctggcacggcatgttgagcgactggcggattatcccaccgtggcgattggcggtatcagtctggcacgcgcgcctgcggtgatagcaacgggtgtcggcagtatcgccgtcgtcagcgccattactcaagccgcagactggcgtttggcaacggcacagttgctggaaattgcaggagttggcgatgaatgaccgtgactttatgcgttatagccgccaaatcctgctcgacgatatcgctctggacgggcagcaaaaactgctcgacagccaggtgctgattatcggtctgggcgggctgggtacacctgctgcgctgtacctggcgggcgctggcgtcgggacgctggtactggcagatgacgacgatgtgcatttaagcaatctgcaacgacaaatcctctttaccactgaagatatcgatcgcccgaaatcgcaggtcagccaacagcgactgacacagttgaatcccgacattcaactgacagcattacaacaacggttaacgggtgaggcgttaaaagatgcggttgcacgggccgatgtggtgctcgactgtaccgacaatatggcgactcgccaggagattaatgccgcctgcgtggcactcaacacgccgcttatcaccgccagcgcggtcggatttggcggtcagttgatggtactgacgccgccctgggagcaggggtgttaccgctgcctgtggccagataaccaggagccagaacgcaactgccgcacggcgggcgtggttggcccggtggtcggggttatgggcactttgcaggcactggaagccattaagttattaagcggtatagagacacctgcgggagaactccgactgttcgacggtaaatcgagccagtggcgcagcctggcgttgcgccgcgccagtggttgcccggtatgcggaggaagcaatgcagatcctgtttaacgatcaagcgatgcagtgcgccgccgggcaaactgttcacgaactactggagcaactcgaccaacgacaagcgggcgcggctctggcgattaatcagcaaatcgtcccgcgtgagcagtgggcgcaacatatcgtgcaggatggcgaccagatcctgctttttcaggttattgcagggggttgaaatgttacgtattgcggacaaaacgtttgattcacatctgtttaccggcacagggaaattcgcttcttcacaactgatggtggaggcgatccgcgcttccggcagccagctggtgacactggcgatgaaacgtgtcgacttgcgccagcacaacgacgctatcctcgaaccgcttatcgcggcgggtgtgaccctgctgccaaatacatccggggcgaaaacagcggaagaagccattttcgccgcccatctggctcgtgaagcgttaggcacaaactggttaaaattagagattcaccctgacgcccgctggctgttgcccgatcccatcgaaaccctgaaagccgccgaaacgctggtacaacagggatttgtcgtgctgccttactgcggggccgatccggtattgtgtaaacgtctggaagaagtcggctgtgcagcggtgatgccgctcggcgcgccgattggctcgaatcagggactggaaacccgcgccatgctggagattattatccagcaggccacagtgccggtggttgtcgatgctggcatcggcgttcccagccatgccgcgcaggcgctggaaatgggggccgacgcggtgttagtgaatacggcgattgccgtcgcggacgatcccgtcaacatggcgaaggcatttcgtctggcggtagaagcaggcctactggcacgtcagtccggaccgggcagccgcagttattttgctcatgccaccagcccgctgaccggatttctggaggcatcggcatgaaaaccttcagcgatcgctggcgacaactggactgggacgacatccgcctgcgtatcaacggcaaaacggctgctgacgtagagcgggcgctaaatgcctcgcaactcacccgcgacgacatgatggcgctgttatcgcctgccgccagtggctatctggaacaactggcccaacgggcgcagcgtctgacccgtcagcgatttggcaacacagttagtttctacgtcccgctttatctttccaatctttgcgctaacgactgcacgtactgtggattttccatgagtaatcgcatcaagcgcaaaacgctggatgaagcggatattgccagggaaagtgccgctatacgggagatgggctttgaacatctgctgttagtcactggtgaacatcaggcgaaagtggggatggattactttcgtcgtcatctccctgcccttcgtgaacagttctcttcactacagatggaagtgcaaccgctggcggagacggaatacgccgagttaaagcaacttggtctggatggcgtgatggtttatcaggagacatatcacgaggcgacttatgcccgccatcatctgaaaggcaaaaaacaggacttcttctggcggctggaaacgccggatcggctggggcgtgcggggattgataagataggcctcggcgcgctaattggcctttccgacaactggcgcgttgacagctatatggttgccgaacatttgctatggctgcaacagcattactggcaaagccgttactctgtctcctttccgcgcctgcgcccgtgtactggcggcattgagcctgcgtcgattatggatgaacgccagttagtgcaaaccatctgcgccttccgactgcttgcaccggagattgaactgtcactctccacgcgggaatcaccgtggtttcgcgatcgcgttattccgctggcgatcaataacgtcagcgccttctcgaaaacgcagccaggtggctatgccgataatcaccccgagttggaacagttctcaccgcacgacgatcgcagaccggaagcggttgctgccgcgttaaccgctcagggtttgcagccggtatggaaagactgggacagctatctgggacgcgcctcgcaaagactatgagacggaatgtaagaacgtaaatttattccgagccgctacggaagatgaaaaacgcaaggttgttgaaagcgttgtgtttttttatggtagtgccgtcagcaggaatgttgtccagggcgaaaagcttcttcctcgtttcgccctgcctttcttaaaaattccgtaatgcaaagtctgaagccatcgcctgttgagcaatgaaagagatctgattgtaagagagtaaatactcaactatgatagagacgaaaataagaacacatgttctcatcttccaggatgcagcagactgaagaaattcagacatcccgcaacctgcgattatcgcaaggtcaaggcaaagtccggtaatggcgttctgaataccagagataattctctggcgaaacccaccttaaggtgggttttgttattttgagggctgaggaagctgcttatttctcaataagttgtaggcaatggtgaaaaatttcactgatttacctttctgtttttcagaaatgggataagcgctagttacatgcaaacggagttttttcttttccctgaaagccctgaacgcaacaaagtaaaatgccttatctcctccgtctaagtccacctcaatcacggcatagctaccatacccggcatgaataacgttgctttctggcagcgccaaaatagttctttttaagtgtgtgcgcgctaagttataacggtgctggcagaagggacgagattctttaggcgcgtggtacattaacgattgtttttcttcgttcgtctgatgttcataatcttttgtgaagcagtgaagagagtaggtaacccaaaagcgatactctaaaggctctttgccctcatgatgctgaacgtagacagcctgatgagcatcaagaaatgataaatcacgaatatcaccatccggatgtccaaaaggtcgccacttttccacttcctgtttcattctcgttccttaagaaagttacacaggaatagtatcgaatccttgccgagtttgactcaattagttcagtcagtttcaggatattagtcatctctacattgattatgagtattcagaaattccttaaatattctgacaaatgctctttccctaaactccccccataaaaaaacccgccgaagcgggtttttacgttatttgcggattaacgattactcgttatcagaaccgcccagacctgcgttcagcagttctgccaggctggcagatgcgtcttctgcagtcacctgcggtgcagccggagcttcacccgcagcacggcgacgcatacgatcctggtggtacgcgtaaccggtacctgccgggatcagacgacccacgataacgttctctttcaggccgcgcagttcgtcgcgtttgcccgcaacggctgcttcggtcagcacgcgagtggtctcctggaacgatgccgcggagatgaaggactcggttgccagagacgctttggtgatacccagcagatcgcgggagtaagttgcacccactttgccgttcgcttccagttcgcggtttgcgatcttgacgcgagagtattcaacctgttcgccttccaggaagtcggagctacccgcgttaacgatggtagctttacgcagcatctgacgaacgataacttcgatgtgtttatcgttaatcttaacgccctgcagacggtatacgtcctgtacttcgttaacgatgtaacgagtaacagcatgaacaccacgcagacgcagaatgtcgtgcggcgcttccggaccgtcggaaattacgtcaccacgttctacacgttcaccttcgaacacgttgagctgacgccatttcggaatcatctcttcgtacggatcgctaccgtctaccggggtgataaccagacgacgtttacctttggtttctttaccgaaggaaacgataccgctgatttcagccaggattgccggctctttcggacgacgtgcttcgaacaggtccgcaacgcgcggcagaccaccggtgatgtccttggtaccgccggattcctgcggaatacgcgccagggtgtcaccagagctgatctgtacgccatcttccagctgaacaatcgctttacccggcaggaagtactgcgctggcatatcggtacctgggatcagaacgtcgttaccctgagcatcaacgattttcagtgccggacgcagatctttaccacctgcggtacgttctgcggaatccagaaccaccagcgaagacagaccggtcagttcgtcggtctgacgcgtaatggtctggccgtcgatcatgtcagtaaagcgtacaaaaccgcttacttcggtgataaccggcatggtgtgcgggtcccagtttgcaacggtttcgccgccagcaacctgttcgccatcgcctttcgccagtaccgcaccgtaaggtactttgtagctttctttagtacgaccgaattcgtcgatcagtttcagttcagtattacgggaagtgataaccagtttaccgctggagttcacaaccgacttcacgttgctgagcttgatgctacctttgtttttcacttggatgctggattcagcagccgcacgagatgccgcaccaccgatgtggaacgtacgcatggtcagctgtgtacccggttcaccgatggactgtgccgcgataacaccgattgcttcacccttgttgatgatgtggccacgcgccaggtcacgaccgtagcagtgcgcacatacaccaaagtcggtgtcacaagatacaacagaacgtactttaaccgcgtcgacagagttctcttccagcaggtcacaccactgttcgtgcagcagcgtgttgcgcggaacgaggatatcagcagtacccggcttcagaacgtcttcagcagttacacgacccagtacgcgatcgcgcagcggctctttaacgtcaccaccctcgataaccggagtcatcatgataccttcatgggtaccacaatcgtcttcggtaaccaccaggtcctgcgccacgtcaaccagacgacgagtcaggtaaccggagttcgcagttttcagtgcggtatccgccagacctttacgagcaccgtgggtggagatgaagtactggagtacgttcagaccttcacggaagttcgcggtgattggcgtttcgatgatggagccatccggcttcgccatcagaccacgcataccagcaagctgacgaatctgtgccgcagaaccacgcgcaccggagtcggccatcatgtagatgctgttgaaggaaacctgcttctcttcctgaccgtcacggttaatcacggtttcagtttgcaggttatccatcatcgctttggatacacgatcgttcgccgcagcccagatatcgataactttgttgtagcgttcgcccgcagttaccagaccagactggaactgctcctgaatttcagcaacttctgcttctgcctcggagatgatttcgtgtttcttctccgggatgaccatgtcatcgataccaacagatgcaccagaacgcgctgcataggcgaagccggtgtacatgatctggtccgcaaaaataacggtcggtttcagaccgagaatgcggtagcaggtgttcagcattttggagattgcttttttacccagcgcctggttgacgatggagtaaggcagacctttcggtacaatcatccacagaatggcacggccaacagtcgtgtctttcaggctggttttcgctactaattcaccgttagcatctttttcatactcggtgatacgcactttaacgcgcgcatgcagagaagccagaccagagcgatacagacgttctgcttctttcgggccagtcagcaccatgccttcgcctttggcgttaacacagtcacgggtcatgtagtacagacccagtacaacgtcctgagacggaacgatgattggttcgccgttcgccggggacaggatgttgttggtagacatcatcagcgcacgcgcttccagctgggcttccagcgtcagcggtacgtgaacagccatctggtcaccatcgaagtcggcgttatatgccgcacaaaccagcgggtgcagctggatagctttaccttcgatcagtaccggttcaaatgcctggatacccagacggtgcagagtcggtgcacggttcagcagtaccgggtgttcgcggataacttcgtccaggatatcccaaacgacagcttcttcgcgctcaaccattttcttcgcagctttaatggtggtagcaagaccacgcagttccagcttgccgtagatgaacggtttgaacagctccagtgccattttcttcggcagaccgcactgatgcagacgcaggtatggacctacggtgattacagaacgaccggagtagtcaacacgcttaccgagcaggttctgacggaaacgaccctgtttacctttgatcatgtcggccaaagatttcagaggacgcttgttagaaccggtgatcgcacgaccgcgacgaccgttatccagcagggcgtctaccgcttcctgcagcatacgtttttcgttacgtacgatgatgtccggcgcagccagatccagcagacgtttcagacggttgttacggttaatgacgcgacgatacagatcgttcaggtcagaagtcgcgaaacgaccaccatccagcggaaccagcggacgcagatctggcggcagtaccggcagaacggtcaggatcatccactctggtttgttaccagactgaacgaacgcttccagcagtttgatacgcttggtcagctttttacgcttggtttcggagttggtttcgttcagctcttcacgcagctgttcgcactcttgctccagatccatgctcttcagcagagcctggattgcttccgcccccatcttcgcgtcgaattcgtcaccgaactcttccagcgcgtccagatactgctcttcagtcaggatctgctgacgttccaggttggtcataccgccttcgataaccacataggattcaaagtacagtacgcgttcgatatcgcgcagcggcatatcgagcagcagaccgatacgggacggcagcgatttcaggaaccagatgtgcgcagtcggggaagccagttcgatgtggcccatacgctcacggcgtactttagtctgggtcacttcaacgccgcacttctcacagatgacgccacggtgtttcaggcgcttgtacttaccgcacaggcactcgtaatcttttaccggcccaaagatacgggcgcagaaaaggccgtcacgttctggtttgaacgtacggtagttgatggtttccggctttttaacttcaccgaaagaccatgaacggatcatgtctggcgaagccagagcaattttgatcgcatcaaactcttcggttttagtctgcgctttcagaaactttaataaatctttcacggatttgctcccgtcggagttagcacaatccgctgccgggttttaacccgacagcagtgacctgtttgagcgagaattactcgtcttccagttcgatgttgatacccagcgaacgaatctctttcaacaatacgttgaaggattctggcatgcccggctccatctgatggttgccgtccacgatgtttttatacatcttggtacgaccgttcacgtcatcagacttaacggtgagcatttcctgcagggtgtatgctgcgccgtatgcttccagcgcccacacttccatctccccgaaacgctgaccaccgaactgtgccttaccacccagcggctgctgagtaaccaggctgtaagaaccggtggaacgcgcgtgcatcttgtcgtcgaccaggtggttcagtttcagcatgtacatgtaaccaacggttaccggacgctcgaactgttcaccagtgcgaccatcgtacaggcggatctgaccggaagtcggcaggtcgccaagtttcagcagctctttaatttctgcttctttcgcaccgtcgaacaccggcgttgcgattggcatacctttgcgcaggttttcagccagacgcataacttcttcatcgctgaaggtactcaggtcaactttctgacgaacgtcagcgcccagatcgtacgcacgctggatgaattcgcgcagtttcgcgacttcttgctgctgtttcagcatggcgttgatcttgtcgccgatacctttcgcagccatacccaggtgggtttcgaggatctgaccgatgttcatacgagacggtacgcccagcgggttcagtacgatgtctaccggcgtaccgttttcatcgtaaggcatatcttcgatcgggttgatcttagaaattacacccttgttaccgtgacgacctgccatcttgtcaccaggctggatacggcgtttaaccgccagatataccttaacaatcttcagcacgcccggtgccagatcgtcgccctgggtgattttgcggcgtttcgcttcgagtttcttctcgaactcgtgtttcagttcgtcatactgctcagccagctgttccagctgattttgtttctcttcgtctgtcaggcccagctccagccagcgatcgcgcggcagtttgtcgagcttctcagcttcaacgccaccggctaccagcacagcacggatacggctgaacagacccgcttcgaggatctgcagttcttcagacaggtctttcttcgcctgtttgagctgcatttcttcgatttccagcgcacgtttgtctttttctacgccatcgcgagtaaagacctgaacgtcgataaccgtaccggatacaccgtttggtacgcgcagagaagagtctttaacgtcagaggctttctcaccgaagatcgcacgcagcagtttttcttctggggtcagctgagtttcacctttcggcgttaccttaccaaccagaatgtcgccaccggtcacttccgcaccaatgtaaacgataccggattcatccagtttggagagcgcagcttcacccacgttcgggatgtcagcggtgatctcttccggacccagcttggtgtcacgggacacacacgccagttcctgaatgtggatggtggtgaaacggtcttcctgaacaacacgctcggatacgaggatggagtcttcgaagttgtaaccattccacggcatgaacgctacgcgcatgttctgaccaagcgccagttcaccgaggtcggtggacggaccgtctgccagcacgtcgccacgttcaaccggttcacccagagacacacacggcatctggttgatacaggtgttctggttagaacgggtgtatttggtcaggttgtagatgtcgatacctgcttcacccggatacatctcgtcttcgttaactttgataacgatacgggaagcatccacgtactgaacgacaccaccacgtttagctaccgcagttacaccggagtcaacggcaacagcacgttccataccagtaccaaccagcggcttatcagcgcgcagagtcggaacggcctgacgttgcatgttcgcacccatcaatgcacggttggcgtcatcgtgttccaggaacgggatcagggacgcaccgacggataccacctgctgggtggatacgtccatgtagtcaacctggtcgcggctgaacaagctggattcgcctttgctacggcaagttaccaggtcttctacgaagtggccttcttcatccaagttggagttcgcctgggcgataacgtagttgccttcttcgatagcagacaggtagtgaatttcgtcagttacaacaccgtcggtcactttacgatacggagtctcaaggaagccgtattcgttagtctgtgcgtacacggacagagagttgatcagaccgatgttcggaccttcaggggtttcgattggacatacgcgaccgtagtgagtcgggtgtacgtctcgaacttcgaagcctgcacgttcacgggtcagaccgcctgggccgagtgcggagatacgacgtttgtgcgtaatctcagacagcgggttgttctggtccataaactgagacagctggctggaaccgaagaactctttcactgctgcggaaatcggcttggcgttgatcatatcctgtggcatcagggtatccagatcgcccagagacagacgctctttcaccgcacgctctacacgtaccaggccaacgcggaactggttttccgccatttcgccaacggaacggatacgacggttgccgaggtggtcgatatcatcgacttcgcctttaccgttacggatatcgatgagctttttcataacatcaatgatgtcgtctttgctcaggataccggaaccttcgatttcttcgcgcagcagagaacggttgaacttcatacgaccaaccgcagacaagtcataacggtcttcggagaagaacaggttctcgaacaggctttcagctgcttcacgagtcggcggctcgccagggcgcatcatgcggtagatttctaccagtgcgctcagacggtcgttagttgggtcgacacgtaaggtttcagagatatatgggccgtgatccagatcgttggtgaacagcgtttcgatacgcttgtgaccagactggctcagcttagccagcagatccaggctcagctccatgttcgctgcgcagatcagctcgccggtagactcatcaatatagtctttagcaaccactttacctgcgatgtactcaaccgggacttcgatcagtttgacgtcgtctttttccagctggcgaatgtggcgcgcagtgatacggcggcctttttctacgtacactttaccgttagcttcgatgtcaaaagatgcggtttcaccacgcaggcgttccggcaccagttccatctgcagcttgttatcacggatttcaaagataactttttcaaagaacaggtcgaggatctgctctgtggtgtagttcagggcgcgcagaatgatggtcgcaggcagtttacggcgacggtcgatacgtacgaacaggttgtccttcggatcgaattcgaagtccagccaggaaccacggtaagggatgatacgcgcgttatacagcactttacccgaagagtgggttttacctttgtcggagtcaaagaagacgcccggactacggtgcagctgggaaacgataacacgctcagtaccgttgataacaaaggtaccgttgtctgtcatgagcggaatttcgcccatgtagacttcttgttctttaatgtcttttacggtgccttccggcgcttcgcgctcatagatcaccagacgcagtttaacgcgcagcggtgcggaataggtcacgccacggatttgacattcctggacgtcaaacaccggttcgccaaggcggtagctgacgtattgcagctcggaattaccgctgtagctctgaatcgggaatacggaacggaaagcagcttccagaccatactgcccttcaggatcttgctcgataaatttctgaaacgagtcaagctggatagaaaggagataaggtacatccagaacttgtggacgtttaccaaaatccttacgaatacgttttttctcggtataggagtaaaccatagggttcctcagctcgctgacaagtcgacccatctgtccattgagcggacagtttgtgcaacactattttgttgaccggaaaatggaacactttccgcaatgcctgttgctatcacgcttaaaccatttcattgcgatttacacagaacggacgtcctgtcgcagtatattaagtcgtcgatagaaacaagcattgaaaggcacagcagtagtcaaacagtgtgaaacgctactggcgccttacagcgcaaaaaggctggtgactaaaaagtcaccagccatcagcctgatttctcaggctgcaaccggaagggttggcttatttaacttcaacttcagcgccagcttcttccagagcttttttcagtgcttctgcgtcgtctttgctcacgccttctttcagagcagccggtgcagattctaccaggtctttagcttctttcagacccaggccagttgcgccacgtactgctttgataacagcaactttgttagcgccagcagctttcagaattacgtcgaattcagttttttcttcagcagcttcaaccgggccagcagctacagctacagcagcagcagcggaaacaccgaatttttcttccattgcagagatcagttctacaacgtccattacagacatagctgcaactgcttcaatgatttgatctttagtgatagacatttaaattgttcctgaatatcagaataagtttatacgtaagcgaatgcgttaaaaagataactgcgattaagcagcttctttcgcatcgcgtacagcagccagagtacgaaccagtttgccagccgaagcttctttcatggttgccatcaggcgtgcaattgcttcttcgtaggtcggcagagttgccaggcggtcgatctgagacgccgggatcagctcaccttcaaaggcagcggctttgacctcaaattttgcattcgctttcgcgaactctttgaacagacgagcagcagcgcccgggtgttccatagagtatgcaatcagggtcggaccaacaaacgcgtctttcaggcactcgaacggagtaccttcaacagcacggcgcagcagggtgttacgaacaacacgcatgtatacgccagcttcgcgacctgctttacgcagttcagtcattttatctacagttacgccacgggaatccgcaactactgcagacagcgcgcctttggctacttcgctgacttcagcaacaatcgcttgtttgtcttgaagatttaaagccattagctttgctcctggatgtttgccagagaaaatctctggaactcacttcactcctccaaacggagagagcgtcttaattacggtgagcagaaacaagccagaatataaaagaataatcttagcgttctgtcaccgtctacgcaggggattaagtttcttgcgaaactcctgcggtcttcgacggaggcctggataggccaggctccaacgaacaaatcttttctatccgtcgctattcagcttgtgacggcgttggcttccttcattcgcaccagtcacatagttagctatgctcctggcgactcactcagttgccgccttgccacaacccgaatatctcggatatacgtctgcattaagcattatacgtgggggtaagattgtagacaaaatcaccgcccacgtaaaggcattagtttacagaagcgctcaggccagcctggtcaactgcaacacctgcacccatggtggtggagatgctaactttcttgatgtacacgcctttcgcctgagtcggttttgcttttttcagcgcaaccagcagagcttccaggttttctttcagtttgtcagcgtcaaagtccactttaccgatggtggtgtggatgatgccgtttttgtcgttacggtaacgaacctggccagctttagcgtttttaaccgcttcagcaacgttcggtgttacagtacccactttcgggtttggcatcaggccgcgcggacccagaacctggcccagctggccaacaacgcgcattgcatccggagaagcaataacaacgtcaaagttcatttcgcctttcttgatctggtcagccagatcttccatacctaccagttctgcgcctgcagctttagcagcttcagcgtttgcaccttgggtaaatacggctacgcgaacggaacggccagtaccgtgcggcagtacagttgcaccacgtacgttctggtcagatttacgagcgtcgatgccgaggttaacagctacgtccacgctttctacgaatttagcagtcgccagctctttcagcagtgcgatagcttcgttgatgtcgtactgtttggttgcatcaactttctcgcggataacacgcatgcgcttggtcagtttagccatttcttagtcctccactaccaggcccatggaacgtgcagtaccttcgatggagcgagtcatcgcttcaatgtcggcaccagtcatgtcggcagctttggtctgcgcgatttcctgcagctgagcgcgggaaattttacccactttgtctttgttcggcttaccggaaccagacttgataccagccgcttttttcagcagaactgctgccggcggggtcttggtaacgaaagtgaaagaacggtcagcgtaaacggtgattactaccggaatcggcagacctttttcgatggaatcagtttttgcgttgaacgctttgcagaattccatgatgtttacgccctgctgacccagagccggacctactggcggactcgggttagccataccagctgcaacctgcagcttgacataggcttgtactttcttagccattataaattcctcaagttgggtaataacgcctctgagaggctccccgtgatataaaaaatcgttttacgggcaaggcccataaaaacaaaaggcgcgaaattgtattccaatctcacgccttgtgcaacgattaaatcgccgcttttttgatcgctgggttaggctttttcaacctggctgaagtccagctctaccggggtcgcacgaccgaagatagaaacagacactttcagacgagatttctcgtaatccacttcttcaacaacaccgttgaagtcagcgaacggaccatcattaacacggaccatttcacccggttcaaacagcgttttcggacgcggcttatcaccaacctgctgcaggcggttcataatcgcatcgacttctttatcgctgattggcgcaggacgatcggaagtaccgccgatgaagcccatcacacgcggtacgctgcgcaccaggtgccagctcgcgtcgttcatcaccatctgaacgaggacgtagccagggaagaatttacgttcgcttttgcgacgctgaccgccacggatttcaaccacttcttcggttggtaccatgacttcaccaaacaaatcttccatgttgtgtaatttgatatgctcacgcagcgacgttgctacgcggccttcaaaaccggaaaacgcctgaacgacgtaccagcgctttttaggagcttcagacatctcagaacctcaggccagtgataaaggataccaggcgaaccagaataccatccagtccccacaggatcagtgacattactgcggtaaccgcagccacaatcagcgtggtgtgcaatgtttcctggcgagtcggccaaatgaccttacggacttcggtacgcgcttcacgggcaaaagcaacggtagctttaccttttgtcgttaacagcgcgacaccacccgctgcagcaatcagaattactacggccagcgcacgcagcggcagcataatgtcgcgataaagatagttgccgacaatcgccaccaggagcaatgccaccacaacgacccacttcatcgcttccaggccgcgcccgcttccttgagcttcggtattcgcactcataaaccaacctgtcagaagttttctacaaacattttcaccccgcgatcgcgaggcaaaccaaatcgaaacgcgtattagcttttcggattatacgccctcaacagagcctgtctcagcaatgattatgacaaagaaaatcactgatgagccaggttctggtacgaaagcgtgcaaaaagggcatcaaatgatgcccttttagtgcgcattgcgtcaaatgttatcggcaattagctcagaacttttgctacaacgcccgcgccaacggtacggccgccttcacggattgcgaaacgcagaccgtcgtccatcgcgatcgggtggatcagggtaacaaccattttgatgttgtcgcccggcattaccatctctacgccttccggcagttcgatggtaccagtcacgtcagtagtacggaagtagaactgcggacggtagcctttgaagaacggagtatgacggccgccttcatctttggacagaatgtacacttcagattcgaacttggtgtgcggcttgatggtgcccggcttagccagtacctgaccacgttcgatttcttcacgtttgataccacgcagcagaacacctacgttctcaccagcacggccttcgtccagcagtttgcggaacatttcaacgccagtacaggtagacttctgagtctctttgataccaacgatttcaacttcttcaccaactttgatgataccgcgttctacacgaccggtaacaacggtaccacgaccggagatggagaatacgtcttcgatcggcagcaggaacggcttgtcaatcgcacgctctggttccggaatgtaagaatccaggaagccagccagttccaggattttcgcttcccactctgcgtcgccttccagcgctttcagagcagaaccacgaacgatcggagtgtcgtcgcccgggaagtcgtactgagacagaagttcacgaacttccatttcaaccagttccagcagctcttcgtcatcaaccatgtcgcatttgttcaggaacacgatgatgtacggaacgcctacctgacgacccagcaggatgtgctcacgagtctgcggcatcgggccgtcagtcgcagcaactaccaggatcgcgccgtccatctgcgcagcaccggtgatcatgtttttaacatagtcggcgtgccccgggcagtctacgtgtgcgtagtgacgggtcggggtgtcgtattcaacgtgagaagtgttgatggtgataccacgagctttttcttccggcgcgttatcgatctggtcgaatgcgcgagcagcaccgccgtaggttttagccagtacggtagtgattgcagcggtcagcgttgttttaccatggtcaacgtggccgatagtaccgacgttaacgtgcggttttgtacgttcaaacttttctttagacatcgattgtccctctaagacacggataaatcggtgatatcaccacatcaaccaggcaacatgcccgacttgttgaatgcaataaacagaaggaaaaaacagggaggagaaaagaagtggtgctgataggcagattcgaactgccgacctcacccttaccaagggtgcgctctaccaactgagctatatcagcacatcttggagcgggcagcgggaatcgaacccgcatcatcagcttggaaggctgaggtaatagccattatacgatgcccgcatcctggaactcggctacctgattttcattctgcactgaatatcgagagaagctctctttattcgagccggtaagcgaacttatcgtctcgggctacgccatcgcgtggccgaaattggtggtgggggaaggattcgaaccttcgaagtctgtgacggcagatttacagtctgctccctttggccgctcgggaaccccaccggacttgatggtgccgactaccggaatcgaactggtgacctactgattacaagtcagttgctctacctactgagctaagtcggcatcaagtagcgcgcattctatggagacatgcgagttcatgcaactaaaaaattgcataatttgttttattggtcacattttatgcgacacgatgaagaaacagccgaacggagggcagattagcacactttttcaacatcattgtgctcaacaatgcgctcctgctaaaccataattctttttatcagatggaatatctgtcacattgcttttcaacgatagcttcctggcagagattttttcttattattcctccccatctggtgttaccctcctgcccattaacccattcaacagaactgtgacgcgccatggcaaatatcgctttgccgatagagctatgaccgccagaaacatgcttatgagtataaaagagcaaacgttaatgacgccttacctacagtttgaccgcaaccagtgggcagctctgcgtgattccgtacctatgacgttatcggaagatgagatcgcccgtctcaaaggtattaatgaagatctctcgttagaagaagttgccgagatctatttacctttgtcacgtttgctgaacttctatataagctcgaatctgcgccgtcaggcagttctggaacagtttcttggtaccaacgggcaacgcattccttacattatcagtattgctggcagtgtcgcggtggggaaaagtacaaccgcccgtgtattgcaggcgctattaagccgttggccggaacatcgtcgtgttgaactgatcactacagatggcttccttcaccctaatcaggttctgaaagaacgtggtctgatgaagaagaaaggcttcccggaatcgtatgatatgcatcgcctggtgaagtttgtttccgatctcaaatccggcgtgccaaacgttacagcacctgtttactcacatcttatttatgatgtgatcccggatggagataaaacggttgttcagcctgatattttaattcttgaagggttaaatgtcttacagagcgggatggattatccacacgatccacatcatgtatttgtttctgattttgtcgatttttcgatatatgttgatgcaccggaagacttacttcagacatggtatatcaaccgttttctgaaattccgcgaaggggcttttaccgacccggattcctattttcataactacgcgaaattaactaaagaagaagcgattaagactgccatgacattgtggaaagagatcaactggctgaacttaaagcaaaatattctacctactcgtgagcgcgccagtttaatcctgacgaaaagtgctaatcatgcggtagaagaggtcagactacgcaaataatttgcaggggagcgaatactcccctttcttatttttctgcactacgcagggatatttcaccgcccatccagggttttattattccatcctgctcaagtaataaagccccctgtttgtctattccgcgtgaaatgccaaatatttctttatcaccaatgataagtttcactgggcgattaataaaattatccagcttttcccagcgcgacagataaggtgccaatccttcttgttcgaagagttccaacgcagcacgtaattcacgtattagcatggccgccaacgtattacgatcgagattgatccccgcttcctgcagcgtgatccacccctgattaacgacactctcttcaacacggcgcattgccatgttgatcccggctccaatgactatttgcgccgcatcgccagttttgccagtcagctccaccagaatgcctgccagcttgcgatcctgcagatagaggtcattaggccatttaacacgaactttatctgcacccagcttgcgtaatacttccgccatcacgataccgataaccagacttaaaccaatcgccgccgccgggccttgttccagacgccagaacatcgacaaatataagtttgcgccaaaaggcgaaaaccatttccgaccccggcgaccacggccagcctgctggtattctgcaatgcaagcatcgcccgatttaagctctccgatacgatcaagaaggtactgattcgtggagtcaatcactggcagcacggctacactaccgccatccagctgacccaatatctgtttagcattaagtaactggataggctcaggcaggctgtatcctttacccggaacggtaaagacatcaacgccccagtcacgcagtgtctgaatgtgtttattaatagccgcccggctcattcccagcgtttcacccaactgctcgccagagtgaaattcaccgttcgctaacagggcaatcaatttcagtggcacggtgttatccttcatgaaattgtctccactgcgctcacttcacctgatgcaccaataaagcggacttcaggctcaagccagacattaaatttttcaccaactttctgtcttacatgatgcgccagctgtacaacatcttcgctttttgcattgtcttcattaatgagaactaacgcctgttgacggtgcaccgcagccccacctatttgcatcccttttagctggcactgatcgataagccaacctgctgccagttttactgaaccatccgcctgggggtaatttggtgctgttggaaattgtgacagtaatgctttagccgtttcggcagatacaacagggtttttgaagaaactaccggcattgccattcacttttggatcagggagtttggtggtgcgcatatgacacaccgcattaaatacttgctgtggcgttactgttgtaggatccagacgagttaagtcaccatacgttagtacaggttgccactcttttggcagacgcagacctacggctacaatagcgaagcggtcctggtattcatgtttaaaaatactgtcgcgatagccaaaacggcactctttggcagttaagcgcacttgcttgcctgtcgccagttcaacagaatcaacataagcgcaaactcgctgtaattctacgccataagcaccaatattctggataggtgatgagccgacacaaccaggaattaatgccagattttccagaccaggcataccttcctgcaaagtgtattttaccagacgatgccagttttctccggctcctacatgtaaataccacgcatcaggttcatcatgaatttcgatacctttgatccggttgatgatcaccgtgccgcgatagtcctccagaaaaagtacattacttccttcacccagaataagaacgggttgtccttctgcggttgcatactgccaggcattgagtaattgttgttcgtcttcggcacatacaatgtgctgagcattatgatcaatgccaaatgtgttccagggttttaaggagtggttcatagctgctttcctgatgcaaaaacgaggctagtttaccgtatctgtggggggatggcttgtagatatgacgacaggaagagtttgtagaaacgcaaaaaggccatccgtcaggatggccttctgcttaatttgatgcctggcagtttatggcgggcgtcctgcccgccaccctccgggccgttgcttcgcaacgttcaaatccgctcccggcggatttgtcctactcaggagagcgttcaccgacaaacaacagataaaacgaaaggcccagtctttcgactgagcctttcgttttatttgatgcctggcagttccctactctcgcatggggagaccccacactaccatcggcgctacggcgtttcacttctgagttcggcatggggtcaggtgggaccaccgcgctactgccgccaggcaaattctgttttatcagaccgcttctgcgttctgatttaatctgtatcaggctgaaaatcttctctcatccgccaaaacagcttcggcgttgtaaggttaagcctcacggttcattagtaccggttagctcaacgcatcgctgcgcttacacacccggcctatcaacgtcgtcgtcttcaacgttccttcaggacccttaaagggtcagggagaactcatctcggggcaagtttcgtgcttagatgctttcagcacttatctcttccgcatttagctaccgggcagtgccattggcatgacaacccgaacaccagtgatgcgtccactccggtcctctcgtactaggagcagcccccctcagttctccagcgcccacggcagatagggaccgaactgtctcacgacgttctaaacccagctcgcgtaccactttaaatggcgaacagccatacccttgggacctacttcagccccaggatgtgatgagccgacatcgaggtgccaaacaccgccgtcgatatgaactcttgggcggtatcagcctgttatccccggagtaccttttatccgttgagcgatggcccttccattcagaaccaccggatcactatgacctgctttcgcacctgctcgcgccgtcacgctcgcagtcaagctggcttatgccattgcactaacctcctgatgtccgaccaggattagccaaccttcgtgctcctccgttactctttaggaggagaccgccccagtcaaactacccaccagacactgtccgcaacccggattacgggtcaacgttagaacatcaaacattaaagggtggtatttcaaggtcggctccatgcagactggcgtccacacttcaaagcctcccacctatcctacacatcaaggctcaatgttcagtgtcaagctatagtaaaggttcacggggtctttccgtcttgccgcgggtacactgcatcttcacagcgagttcaatttcactgagtctcgggtggagacagcctggccatcattacgccattcgtgcaggtcggaacttacccgacaaggaatttcgctaccttaggaccgttatagttacggccgccgtttaccggggcttcgatcaagagcttcgcttgcgctaaccccatcaattaaccttccggcaccgggcaggcgtcacaccgtatacgtccactttcgtgtttgcacagtgctgtgtttttaataaacagttgcagccagctggtatcttcgactgatttcagctccatccgcgagggacctcacctacatatcagcgtgccttctcccgaagttacggcaccattttgcctagttccttcacccgagttctctcaagcgccttggtattctctacctgaccacctgtgtcggtttggggtacgatttgatgttacctgatgcttagaggcttttcctggaagcagggcatttgttgcttcagcaccgtagtgcctcgtcatcacgcctcagccttgattttccggatttgcctggaaaaccagcctacacgcttaaaccgggacaaccgtcgcccggccaacatagccttctccgtccccccttcgcagtaacaccaagtacaggaatattaacctgtttcccatcgactacgcctttcggcctcgccttaggggtcgactcaccctgccccgattaacgttggacaggaacccttggtcttccggcgagcgggcttttcacccgctttatcgttacttatgtcagcattcgcacttctgatacctccagcatgcctcacagcacaccttcgcaggcttacagaacgctcccctacccaacaacgcataagcgtcgctgccgcagcttcggtgcatggtttagccccgttacatcttccgcgcaggccgactcgaccagtgagctattacgctttctttaaatgatggctgcttctaagccaacatcctggctgtctgggccttcccacatcgtttcccacttaaccatgactttgggaccttagctggcggtctgggttgtttccctcttcacgacggacgttagcacccgccgtgtgtctcccgtgataacattctccggtattcgcagtttgcatcgggttggtaagtcgggatgacccccttgccgaaacagtgctctacccccggagatgaattcacgaggcgctacctaaatagctttcggggagaaccagctatctcccggtttgattggcctttcacccccagccacaagtcatccgctaatttttcaacattagtcggttcggtcctccagttagtgttacccaaccttcaacctgcccatggctagatcaccgggtttcgggtctataccctgcaacttaacgcccagttaagactcggtttcccttcggctcccctattcggttaaccttgctacagaatataagtcgctgacccattatacaaaaggtacgcagtcacacgcctaagcgtgctcccactgcttgtacgtacacggtttcaggttctttttcactcccctcgccggggttcttttcgcctttccctcacggtactggttcactatcggtcagtcaggagtatttagccttggaggatggtccccccatattcagacaggataccacgtgtcccgccctactcatcgagctcacagcatgtgcatttttgtgtacggggctgtcaccctgtatcgcgcgcctttccagacgcttccactaacacacacactgattcaggctctgggctgctccccgttcgctcgccgctactgggggaatctcggttgatttcttttcctcggggtacttagatgtttcagttcccccggttcgcctcattaacctatggattcagttaatgatagtgtgtcgaaacacactgggtttccccattcggaaatcgccggttataacggttcatatcaccttaccgacgcttatcgcagattagcacgtccttcatcgcctctgactgccagggcatccaccgtgtacgcttagtcgcttaacctcacaacccgaagatgtttctttcgattcatcatcgtgttgcgaaaatttgagagactcacgaacaactctcgttgttcagtgtttcaattttcagcttgatccagatttttaaagagcaaatatctcaaacatcacccgaagatgagttttgagatattaaggtcggcgactttcactcacaaaccagcaagtggcgtcccctaggggattcgaacccctgttaccgccgtgaaagggcggtgtcctgggcctctagacgaaggggacacgaaaattgcttatcacgcgttgcgtgatattttcgtgtagggtgagctttcattaatagaaagcgaacggccttattctcttcagcctcactcccaacgcgtaaacgccttgcttttcactttctatcagacaatctgtgtgagcactacaaagtacgcttctttaaggtaaggaggtgatccaaccgcaggttcccctacggttaccttgttacgacttcaccccagtcatgaatcacaaagtggtaagcgccctcccgaaggttaagctacctacttcttttgcaacccactcccatggtgtgacgggcggtgtgtacaaggcccgggaacgtattcaccgtggcattctgatccacgattactagcgattccgacttcatggagtcgagttgcagactccaatccggactacgacgcactttatgaggtccgcttgctctcgcgaggtcgcttctctttgtatgcgccattgtagcacgtgtgtagccctggtcgtaagggccatgatgacttgacgtcatccccaccttcctccagtttatcactggcagtctcctttgagttcccggccggaccgctggcaacaaaggataagggttgcgctcgttgcgggacttaacccaacatttcacaacacgagctgacgacagccatgcagcacctgtctcacggttcccgaaggcacattctcatctctgaaaacttccgtggatgtcaagaccaggtaaggttcttcgcgttgcatcgaattaaaccacatgctccaccgcttgtgcgggcccccgtcaattcatttgagttttaaccttgcggccgtactccccaggcggtcgacttaacgcgttagctccggaagccacgcctcaagggcacaacctccaagtcgacatcgtttacggcgtggactaccagggtatctaatcctgtttgctccccacgctttcgcacctgagcgtcagtcttcgtccagggggccgccttcgccaccggtattcctccagatctctacgcatttcaccgctacacctggaattctacccccctctacgagactcaagcttgccagtatcagatgcagttcccaggttgagcccggggatttcacatctgacttaacaaaccgcctgcgtgcgctttacgcccagtaattccgattaacgcttgcaccctccgtattaccgcggctgctggcacggagttagccggtgcttcttctgcgggtaacgtcaatgagcaaaggtattaactttactcccttcctccccgctgaaagtactttacaacccgaaggccttcttcatacacgcggcatggctgcatcaggcttgcgcccattgtgcaatattccccactgctgcctcccgtaggagtctggaccgtgtctcagttccagtgtggctggtcatcctctcagaccagctagggatcgtcgcctaggtgagccgttaccccacctactagctaatcccatctgggcacatccgatggcaagaggcccgaaggtccccctctttggtcttgcgacgttatgcggtattagctaccgtttccagtagttatccccctccatcaggcagtttcccagacattactcacccgtccgccactcgtcagcaaagaagcaagcttcttcctgttaccgttcgacttgcatgtgttaggcctgccgccagcgttcaatctgagccatgatcaaactcttcaatttaaaagtttgacgctcaaagaattaaacttcgtaatgaattacgtgttcactcttgagacttggtattcatttttcgtcttgcgacgttaagaatccgtatcttcgagtgcccacacagattgtctgataaattgttaaagagcagtgccgcttcgctttttctcagcggcgcggggtgtgcataatacgccttcccgctacagagtcaagcatttatttttgctttctctgccggagttctcaggagaaccccgctgacccggcggcgtgtttgccgttgttccgtgtcagtggtggcgcattatagggagttattccggcctgacaagaggaaatttaaaataattttctgaccgcgcaacattcaaccaaatcagcctaaaactgccagtttttcgagcgtttcgaagccgtaacgctgtaaaacgggcaataattgttcagctcctggcgtcattgccatacaaaaggcaatattcgcatcggcagattttgcatccggggcttcatgttctaacaaccaggccgttcggcgagcaatcgctgcgccagaatccaccagccgggttccctctggcagcacttgtaacagttcttcttgtagtagagggaaatgggtgcaacccaatacaacggtatctggcggctctttcattcttaaccacgggcgtaggatacgttttagtgcatccagagaaacatcttcgccatgtagcttcgcttcagccaactcaaccatctctgccgagcccagcatttctatctggcattcattagcgaaacgcgcgatcagctcatgagtataagaacgtttaactgttccgcgggttgccagtaatccgacaatgccatttgccgtcagacgtgcagcaggtttaatcgccggcacgacaccaacaaccgggaagtcgaacttttcgcgtaatgcaggaagtgaaacggtactggcagtgttgcaagcgaccacagccagcgcaaggggataacgttcttgcaccgcggtgacaattgccaccactcgctcaacaataaacgcttcgcttttttcgccatacgggaaagcgacgttatcgaaagcataaatgtaatggagatccggtaagagatgccggatctcgtcatagaccgacaacccaccgacgccggagtcaaacaccagcacggtgggacgtggttcagaaggtgtagctgccagacaaggtgtattcccgtcctgcagtttggtagccatagactgtctcataatctttgtcgaacaggttggctattttaccacgaactgtcaggtgagaggtgaccggatacgcaaccgcaagatcccacaagctcacaccgcccattttaacggtttgataaggataagatgagtaatccttatcatagcgagtgcctaaatactgataagtaataccccagtcgaagtcatacaactgccagtcgagctggtatttcacctgctgtttagcacggcgtaacaacggcgtgtcggtaatcgcattgcgcgcatcgacataatcataactcacagtatgcgtcagtggtccggtatcaaaattggcggtcgcctcgacgcccttaatccgcgctttcccttcgttgtaatatttcagggtgtgatcatcataatcgatcaagtcactgacatcgttacgatatccggaaatacgccagttcaccccagcggttaagccttcaaacgcgccttcccactgtttgcttttctccgggtccagattcggatttccgtagaagccatacagttgccccagatttggtgccttataagatgtcccgtaggaagcaatgaagcgataaccttcgatgaattcccaaccggcgctggtttgccaggttccatgacgaccaaactgtgagttatcgtcactgcgtgctgcgccttcaaaggtaaaatcgccgacttgttgcagcccggtcagatagatgccggtattacgttgatcatatccatcctcaacataacctgtacccggcgtcgtagtctgtttctgccagtcgacacccgcaccaatactaccgtgaccaacgatgacattgtttgcccactggacggtgtattgcttcatctcatcgagcgtcgccgacgaatcataacgaccataatggggatcgtagttgtaatctttgctatggctatagctggtaatgagttgtgatttaatcagttcgccgttatagcgcagcccggcgtcccaactttggctatagagtttacgggtatcgagcaacggtgaaccgggagaataatacgcgtcataattggtacggttatcatagccatagccgcgcacaaagccgctccaggcatcagtaaagttatgctccagcgcgccataaagcgttttacttaaaaaaccatcgttatctgtctgcgcttgcgttccggtattaccataggcaacaacatcataaccatgagtatgggcataatcgcccaacagcgttacccgtgtcttatcccccagttgttgctgcgtagagacatcatagttctgataactattgcttccccaccctgctgaaatttccgttccgggttcatcgcgcgtcgtgatgatattcaccaccccgcctattgcatcggaaccataaacagcggagcgcggcccacggatatattcaacacgctggacaagcgcaatagggaactggctaaggtcggcagaaccactcacccccgccagattcaggcgtacgccatcaattaacaccaacacatgactggcatttgtaccgcgaataaaaatagatgagagctgacctgaaccgccgttttgggtgatatcgacgcccggaagacggcgcagcacatcattgaccgaggtcgactgccagcggtcgatatcctgacgggtcacaacggtggttggtgcaagcacagtgctgcgcggctgttcaaaacggttagcagtaacgacgagagtatccgggctggtatcctgtgcccaagcggaaaatgccgtgacggaacacgccgtcagcagcgaagcttttttaatcattgtaaagcatccacaatagaagaaggatgccgcaggtttcatcaatattacgcgatgatgagaaccagatgcgacgttggccggcaggtcttcgggcttggaggggtatctaagatactaagagatgatgacttcccaccgaatggcagtgtccgcataacgcaatcatcgcacctttccttaccgctgcgcgtcagctccagattcgcactggattccctattaactcacaggaccggcaagtggatgctacaggttgtaacaagttactgtccagacgtagctcacaaataggaattcatcaagatctggacatctgatgagcaatccctacaatcgccgcgtactttaatttttcaggatacatcatgacccccgaacaccttccaacagaacagtatgaagcgcagttagccgaaaaagtggtacgtttgcaaagtatgatggcaccgttttctgacctggttccggaagtgtttcgctcgccggtcagtcattaccggatgcgcgcggagttccgcatctggcacgatggcgatgacctgtatcacatcattttcgatcaacaaaccaaaagccgcatccgcgtggatagcttccccgccgccagtgaacttatcaaccagttgatgacggcgatgattgcgggtgtgcgtaataatcccgttctgcgccacaagttgttccagattgattacctcactacactgagtaatcaggcggtggtttccctgctataccataagaagctggatgatgagtggcgtcaggaagcggaggccctgcgcgatgcactgcgcgcgcagaatctgaatgtgcatctgattggtcgggcaacgaaaaccaaaatcgagctggatcaggattacatcgatgaacgtctgccggtcgcagggaaagagatgatctaccgtcaggtagaaaacagctttacccagccgaacgcggcgatgaatattcagatgctggaatgggcgctggacgtaaccaaaggctcaaaaggcgatttactggagctgtactgcggcaacggtaacttttcattagcgctggcgcgtaattttgatcgggtattagccaccgaaatcgctaagccgtcggttgctgctgcgcaatacaacatcgcagctaaccatattgataacgtacaaattattcgtatggcggcagaagaatttactcaggcgatgaatggtgtgcgcgagtttaaccgcctgcaagggatcgacttaaagagttatcagtgcgaaaccatttttgtcgaccctccgcgcagcggtctggacagtgaaaccgagaaaatggtgcaggcgtatccgcgtattttgtacatctcctgtaacccggaaacgttatgcaagaatctggaaacattaagccagacgcacaaggtcgaacgtctggctctgtttgatcagttcccctacacgcaccatatggagtgcggcgtattactgaccgcgaagtaaaacccatgccggatgcgccagcatccggcataataccgattactcagcaacttcctgcttacggttacgcatcttcgcgccaatccagaacaccataatgacggagagtactgccgggaagaagttagagccgatatccggatattccgcacgaactaccgtgctgtacagcagtacgccgagaataaaacaggcagctgccagacccggcaagcctaccggcatagtgcgattaagataacgttgatgcaggcagtaaaccgtcagcaccagggaaataatcgggaatacagaaaatggcacaatggagctaaacagcgctgcgaaagtaccattaatcgataagccagcaactaacgccagcagcagcgtacctctatcttgatttgcttgtttcattactcgtccttcacatttcccggaataattgcggttttctcttgttcacggcgataccagtaataagcccctttcgaaatcattcgcagttgcagtaccagtcgctcttctaattgccgacgttgttcgacgccgacgtccaacgcctcggcacccgcactgaagacaattgtcaccattgcttcggcttgcgcttcagtaaacgcacgcggcatatggttttcgagttccagatagtccgcaagttccgcaatgaagtgctgaatttcacgcgcaacggcggcacgaaacgcagcggaggtgccggagcgttcccgcaataataaccggaaggcgttaggattattaccgatgaactccataaatgtggagaccgaggtgcggatcacactcccgcctttggcgatacgctgacgcgcctggcgcatgagttggcgtagcattaaaccgctctcatcaaccatggtcagacccagttcgtctacgtcgcggaaatgccgataaaaagaggtgggagcaatgcccgcttcacgcgccacttcacgcaaactcaggctggcgaagctgcgttcagcacttaattggctaaatgcggcttccaccagcgaacggcgggttttttctttttgttgcgctcttacgcccatcacgatgtctgaatccttgccaaaagtactgctggcactataccagagaatgaacatactggattgctccagtattgtgaatgaacggtaacgcaataaaacatatttactgcaattctttggccggttcttttacgtacagcggaaacctgccgcttaaacggagagtatcgtcgataaaaatccaataaaacgtcagggcaaaagtaagaaacagacaaagcaaaggccgctcaggatatagccagataaatgacggggatcaattggcttacccgcgataaaatgttaccattctgttgcttttatgtataagaacaggtaagccctaccatgccacattcctacgattacgatgccatagtaataggttccggccccggcggcgaaggcgctgcaatgggcctggttaagcaaggtgcgcgcgtcgcagttatcgagcgttatcaaaatgttggcggcggttgcacccactggggcaccatcccgtcgaaagctctccgtcacgccgtcagccgcattatagaattcaatcaaaacccactttacagcgaccattcccgactgctccgctcttcttttgccgatatccttaaccatgccgataacgtgattaatcaacaaacgcgcatgcgtcagggattttacgaacgtaatcactgtgaaatattgcagggaaacgctcgctttgttgacgagcatacgttggcgctggattgcccggacggcagcgttgaaacactaaccgctgaaaaatttgttattgcctgcggctctcgtccatatcatccaacagatgttgatttcacccatccacgcatttacgacagcgactcaattctcagcatgcaccacgaaccgcgccatgtacttatctatggtgctggagtgatcggctgtgaatatgcgtcgatcttccgcggtatggatgtaaaagtggatctgatcaacacccgcgatcgcctgctggcatttctcgatcaagagatgtcagattctctctcctatcacttctggaacagtggcgtagtgattcgtcacaacgaagagtacgagaagatcgaaggctgtgacgatggtgtgatcatgcatctgaagtcgggtaaaaaactgaaagctgactgcctgctctatgccaacggtcgcaccggtaataccgattcgctggcgttacagaacattgggctagaaactgacagccgcggacagctgaaggtcaacagcatgtatcagaccgcacagccacacgtttacgcggtgggcgacgtgattggttatccgagcctggcgtcggcggcctatgaccaggggcgcattgccgcgcaggcgctggtaaaaggcgaagccaccgcacatctgattgaagatatccctaccggtatttacaccatcccggaaatcagctctgtgggcaaaaccgaacagcagctgaccgcaatgaaagtgccatatgaagtgggccgcgcccagtttaaacatctggcacgcgcacaaatcgtcggcatgaacgtgggcacgctgaaaattttgttccatcgggaaacaaaagagattctgggtattcactgctttggcgagcgcgctgccgaaattattcatatcggtcaggcgattatggaacagaaaggtggcggcaacactattgagtacttcgtcaacaccacctttaactacccgacgatggcggaagcctatcgggtagctgcgttaaacggtttaaaccgcctgttttaaaactttatcgaaatggccatccattcttgcgcggatggcctctgccagctgctcatagcggctgcgcagcggtgagccaggacgataaaccaggccaatagtgcggcgtggttccggcttaatgcacggcagataaacaaccccatcgcgtttgcgctccggcggcacagccagcgctggcagtaaagtgatcccgctacctgccgccaccatgttgcgcagagtttccaggctggtcgcgcggaagtgtgtatcttcatccgccccggcttcaaaacagaaacccattgcctgatcgcgcaaacagtgaccatcttccagcatcagcagtttttcccctgccagatcggccatcggtacgcattcgcggttcgcccacgggtgatcttcatagatagccagcaacattggctcatcaaacaacggcacttcaatgaatgcttcgctctctttcaccagcgcgaggatcacgcaatcgagtttgccgctgtccagttgcgccagtaactggtgggtctgtgcttcatgcagatacatttccagctttggaaaggtctggtgcagcatagggataatatgcggtagcaggtacggtccaactgtgggaatcaaaccaatgtgcagcggtccggacatcgtctcgccctgctggcttgccatctctttaaggactttcacctcacgcagcacggtacgcgcctgatccaccagcagcattcccgcctgggtgaacaacactttacggctggtccgctccagcaacatcacgcccagctcatcttccagcttacgaatttgcccgctaagcgtcggctggctaacgtggcaggaatctgccgcacgccgaaaatggcggtgttcagccaatgccaccaggtactcaagatcacgaatattcattatccatcctccatcgccacgatagttcatggcgataggtagaatagcaatgaacgattatccctatcaagcattctgactgataattgctcacagaaacggagcggcacctcttttaacccttgaagtcactgcccgtttcgagagtttctcaactcgaataactaaagccaacgtgaacttttgcggatctccaggatccgcttttttttgccataaaaaagcccggcgataagccaggctcaaatttatacatataaatgttcttaccctaaccgagcctgcgcaaaagcaatcgcctgcgccacctgctgcggtgagacgccgccttttgccgcacgcttgtcgaggcacgattgcagcgacagaatcggatagacatcttcgtcaatcacctgactgaatttctgcaactcactgagcggcagatcttccagcggtttgccctgacgaatggcttccaccaccgcttcaccaacaatatggtgcgcctcgcggaacggtacgcctttcgccaccagataatccgccagttcggtggcgttggcgtaaccctgctgagccgcttcctggcaacgtggacgtttcacctgaatgccgtccagcaccagcgccgccatatgcaggcagtccagccaggtatcgagcgcgtcgaacagaccttctttgtcttcctgcatatctttgttgtaagccagcggcaaacctttcagcgtcatcatcatgccggttaacgccccctgcacccggccgcatttaccgcgaatcagctccagcgcatccgggtttttcttctgcggcattaatgatgaaccggaagtcacgcggtcagaaagctccacaaaccccgcttcgccggtgttaaagaaaatcagatcttcagcaaaacgcgacagatgcaccatgccgatagcggcagcagaaagcagttccaacacatggtcacggtcagaaacgctgtcgagactgttacgggtcgccgaagcaaagcccagccagcctgctaactgttcacggtcgatttcataggccgttcccgccagcgcgccacagcctagcgggctgacatccagacgcttaagcgcatcctgcaaacggctttcatcacgcgccagcatctcaacataggccaggcaccagtgcgcgaacgtcaccggctgggcgcgttgcaggtgagtgtaacctggcattaccgcgtcctgattgttttgtgcggtttccaccagcgccgattgcagctgccggttagccgtcagtaactcgctaacggtatctttgcaccacagtttcaggtcagtcgctacctgatcattacggctacgcccggtatgcagctttttgcctaactggcccactttgtcgatcagtttgccttccacccagctatggatatcttcggcgtcgctttcaaggatttgttgtggcctggcgcgaacatcttccagcaacacgttcagcgcctcttccagttgcgcctgctcttctgcggttaacacgcctaccgtgaccagggctttggaccaggccacagagccaacaatatcctgctccgccagacggtaatcaaagcgcagtgagtcgttgaattgtttgaaccgttgatctgctgcctgggtaaaacgcccgccccaaagtgccataactctgtttccttattttgaaattcaatgccggaaagctgcgcctccggccaacaaaacttaagctaaaatccgcgtacccatcggcataccgttaaacagtgccggaagctgctccgcatgacgccaggaggcgatatctaccggacggcccagcgtgcgggccgcatccagcgccgcgttcactttcactatcatgccgtcagtaataatgccctgctcaatcagttgttctgctttcgcggcggtcatttcggcaatgcgttgccctttgccgtcgagaatgccgctgacgtcggagagcaaaatcagatccgcgcccagcgttgccgccagcgccgttgccgcctggtcggcattgacgttcatcagttgcccttcgtctgttacgccaatggagctgaccaccggcagataaccgttctccagcaaggagttgataagcttaggcgaacctggctgcgccagtccaacatgacctaactcttcatcaagctgggtcactttgacgctgtcgccgtcaccgagaaacaaacctacggccgcaatctgatgtttcttcgcccatgccaacagggttttatttgccgttcccgccagtgctccggtgataatgtctatctgatcagcaggcgtcacccgcaggccgtttttctttttcaccggcagattcagccctttcatcagctcatccaccacgcaaccgccgccgtgcacaatcaccagcggacgctgatgtgactcacgataattcaccagtgcgctaaacagacgttccagcgcctcttcactatccagcagtacgccgcccagtttgataattaatggattcatcattgcacccttaaataagagactgcgtttccgcatagccgaaacgaatattggcgcactgtaccgcttgtgccgccgcgcctttcagtaagttgtcttcggtcgccacaataatcagatgctcgccctgaacggcaaacccgatatcgcaaaatggcagcccaacgacatttttcagcgccggaacgcctttgtcatacagccgcaccagcggtttatgggcatacgcctgctgtaacacttgcgcgacttgcgcctgggtcacacccgatttcaggcggcaggtaatggtttcgagaatgccgcgcgggaaattgcccagatgtggggtgaagataacgtcagcaccgaggtgtgtggcgatctctggttgatggcgatgagtaaagacgccatacggttgcaggctaacttcacaaaagctgtttgaaatggccgctttacgccctgcaccgctcacgccgctggtggcgttgatcaccggccactgattgaggtcaagaagatcggcatcaatcaacggtttcagcgccagctgtgccgccgtcggataacagcccggcaccgcaatcaaattcgcttcttttaatttattaccgcaccactccgccagaccgtaggctgcctgttccaacagttccgggtattgatgggtaaagccgtaatatttttcatagaaggtggcgtcgttaacacgaaacgcgccggaaaggtcgaacaccacgcagcccgcttcaagaaactgcggcgctaaatcgtggctaacttcatgggcggtggcgagaaacactacgtccacccctgggctaaactcgctgatatccgacatcggctgcaacggcagatcaacgatgccttttagctgcggatgcaaatcggagattaactttcccgcatcattgctttgcgctgaaacagtcaaagcggttatgttcatatgcggatggcgatttacataggtcactagctctgcgccagcgtagccgctggcacccacaatcagcgtattcaacatcggggctattcaccttcttatgtctggttgccaggttaaacgtaaaacattcaccttacggctggtgggttttattacgctcaacgttagtgtatttttattcataaatactgcatgaatattgatactatcatgaccagaggtgtgtcaacaatgaaaaacaaattaccgccatttatcgagatttaccgcgctctgattgccacaccttcaataagcgccacggaagaggcactcgatcaaagcaatgcagatttaatcactctgctggcggactggtttaaagatttgggcttcaatgtggaagtgcagcctgttccaggaactcgcaacaaattcaatatgctggcaagtatcggacagggggctggcggcttgttgctggcggggcataccgatacggtgccatttgatgacggtcgctggacgcgcgatccgtttacactgacggagcatgacggcaagctttacggcttaggcaccgccgacatgaaaggcttttttgcgtttatccttgatgcgctacgcgatgtcgacgtcacgaaactgaaaaaaccgctctacattctggcgactgctgatgaagaaaccagtatggccggagcgcgttattttgccgaaactaccgccctgcgcccggattgcgccatcattggcgaaccgacgtcactacaaccggtacgcgcacataaaggtcatatctctaacgccatccgtattcagggccagtcggggcactccagcgatccagcacgcggagttaacgctatcgaactaatgcacgacgccatcgggcatattttgcaattgcgcgataacctgaaagaacgttatcactacgaagcgtttaccgtgccataccctacgctcaacctcgggcatattcacggtggcgacgcttctaaccgtatttgcgcttgctgtgagttgcatatggatattcgtccgctgcctggcatgacactcaatgaacttaatggtttgctcaacgatgcattggctccggtgagcgaacgctggccgggtcgtctgacggtcgacgagctgcatccgccgatccctggctatgaatgcccaccgaatcatcaactggttgaagtggttgagaaattgctcggagcaaaaaccgaagtggtgaactactgtaccgaagcgccgtttattcaaacgttatgcccgacgctggtgttggggcctggctcaattaatcaggctcatcaacctgatgaatatctggaaacacggtttatcaagcccacccgcgaactgataacccaggtaattcaccatttttgctggcattaaaacgtaggccggataaggcgctcgcgccgcatccggcgctgttgccaaactccagtgccgcaataatgtcggatgcgatgcttgcgcatcttatccgacctacagtgactcaaacgatgcccaaccgtaggccggataaggcgctcgcgccgcatccggcactgttgccaaactccagtgccgcaataatgtcggatgcgatacttgcgcatcttatccgaccgacagtgactcaaacgatgcccaactgtaggccggataaggcgctcgcgccgcatccggcactgttgccaaactccagtgccgcaataatgtcggatgcgatacttgcgcatcttatccgacctacacctttggtgttacttggggcgattttttaacatttccataagttacgcttatttaaagcgtcgtgaatttaatgacgtaaattcctgctatttattcgtttgctgaagcgatttcgcagcatttgacgtcaccgcttttacgtggctttataaaagacgacgaaaagcaaagcccgagcatattcgcgccaatgcgacgtgaaggatacagggctatcaaacgataagatggggtgtctggggtaatatgaacgaacaatattccgcattgcgtagtaatgtcagtatgctcggcaaagtgctgggagaaaccatcaaggatgcgttgggagaacacattcttgaacgcgtagaaactatccgtaagttgtcgaaatcttcacgcgctggcaatgatgctaaccgccaggagttgctcaccaccttacaaaatttgtcgaacgacgagctgctgcccgttgcgcgtgcgtttagtcagttcctgaacctggccaacaccgccgagcaataccacagcatttcgccgaaaggcgaagctgccagcaacccggaagtgatcgcccgcaccctgcgtaaactgaaaaaccagccggaactgagcgaagacaccatcaaaaaagcagtggaatcgctgtcgctggaactggtcctcacggctcacccaaccgaaattacccgtcgtacactgatccacaaaatggtggaagtgaacgcctgtttaaaacagctcgataacaaagatatcgctgactacgaacacaaccagctgatgcgtcgcctgcgccagttgatcgcccagtcatggcataccgatgaaatccgtaagctgcgtccaagcccggtagatgaagccaaatggggctttgccgtagtggaaaacagcctgtggcaaggcgtaccaaattacctgcgcgaactgaacgaacaactggaagagaacctcggctacaaactgcccgtcgaatttgttccggtccgttttacttcgtggatgggcggcgaccgcgacggcaacccgaacgtcactgccgatatcacccgccacgtcctgctactcagccgctggaaagccaccgatttgttcctgaaagatattcaggtgctggtttctgaactgtcgatggttgaagcgacccctgaactgctggcgctggttggcgaagaaggtgccgcagaaccgtatcgctatctgatgaaaaacctgcgttctcgcctgatggcgacacaggcatggctggaagcgcgcctgaaaggcgaagaactgccaaaaccagaaggcctgctgacacaaaacgaagaactgtgggaaccgctctacgcttgctaccagtcacttcaggcgtgtggcatgggtattatcgccaacggcgatctgctcgacaccctgcgccgcgtgaaatgtttcggcgtaccgctggtccgtattgatatccgtcaggagagcacgcgtcataccgaagcgctgggcgagctgacccgctacctcggtatcggcgactacgaaagctggtcagaggccgacaaacaggcgttcctgatccgcgaactgaactccaaacgtccgcttctgccgcgcaactggcaaccaagcgccgaaacgcgcgaagtgctcgatacctgccaggtgattgccgaagcaccgcaaggctccattgccgcctacgtgatctcgatggcgaaaacgccgtccgacgtactggctgtccacctgctgctgaaagaagcgggtatcgggtttgcgatgccggttgctccgctgtttgaaaccctcgatgatctgaacaacgccaacgatgtcatgacccagctgctcaatattgactggtatcgtggcctgattcagggcaaacagatggtgatgattggctattccgactcagcaaaagatgcgggagtgatggcagcttcctgggcgcaatatcaggcacaggatgcattaatcaaaacctgcgaaaaagcgggtattgagctgacgttgttccacggtcgcggcggttccattggtcgcggcggcgcacctgctcatgcggcgctgctgtcacaaccgccaggaagcctgaaaggcggcctgcgcgtaaccgaacagggcgagatgatccgctttaaatatggtctgccagaaatcaccgtcagcagcctgtcgctttataccggggcgattctggaagccaacctgctgccaccgccggagccgaaagagagctggcgtcgcattatggatgaactgtcagtcatctcctgcgatgtctaccgcggctacgtacgtgaaaacaaagattttgtgccttacttccgctccgctacgccggaacaagaactgggcaaactgccgttgggttcacgtccggcgaaacgtcgcccaaccggcggcgtcgagtcactacgcgccattccgtggatcttcgcctggacgcaaaaccgtctgatgctccccgcctggctgggtgcaggtacggcgctgcaaaaagtggtcgaagacggcaaacagagcgagctggaggctatgtgccgcgattggccattcttctcgacgcgtctcggcatgctggagatggtcttcgccaaagcagacctgtggctggcggaatactatgaccaacgcctggtagacaaagcactgtggccgttaggtaaagagttacgcaacctgcaagaagaagacatcaaagtggtgctggcgattgccaacgattcccatctgatggccgatctgccgtggattgcagagtctattcagctacggaatatttacaccgacccgctgaacgtattgcaggccgagttgctgcaccgctcccgccaggcagaaaaagaaggccaggaaccggatcctcgcgtcgaacaagcgttaatggtcactattgccgggattgcggcaggtatgcgtaataccggctaatcttcctcttctgcaaaccctcgtgcttttgcgcgagggttttctgaaatacttctgttctaacaccctcgttttcaatatatttctgtctgcattttattcaaattctgaatataccttcagatatccttaaggaattgtcgttacattcggcgatattttttcaagacaggttcttactatgcattccacagaagtccaggctaaacctctttttagctggaaagccctgggttgggcactgctctacttttggtttttctctactctgctacaggccattatttacatcagtggttatagtggcactaacggcattcgcgactcgctgttattcagttcgctgtggttgatcccggtattcctctttccgaagcggattaaaattattgccgcagtaatcggcgtggtgctatgggcggcctctctggcggcgctgtgctactacgtcatctacggtcaggagttctcgcagagcgttctgtttgtgatgttcgaaaccaacaccaacgaagccagcgagtatttaagccagtatttcagcctgaaaattgtgcttatcgcgctggcctatacggcggtggcagttctgctgtggacacgcctgcgcccggtctatattccaaagccgtggcgttatgttgtctcttttgccctgctttatggcttgattctgcatccgatcgccatgaatacgtttatcaaaaacaagccgtttgagaaaacgttggataacctggcctcgcgtatggagcctgccgcaccgtggcaattcctgaccggctattatcagtatcgtcagcaactaaactcgctaacaaagttactgaatgaaaataatgccttgccgccactggctaatttcaaagatgaatcgggtaacgaaccgcgcactttagtgctggtgattggcgagtcgacccagcgcggacgcatgagtctgtacggttatccgcgtgaaaccacgccggagctggatgcgctgcataaaaccgatccgaatctgaccgtgtttaataacgtagttacgtctcgtccgtacaccattgaaatcctgcaacaggcgctgacctttgccaatgaaaagaacccggatctgtatctgacgcagccgtcgctgatgaacatgatgaaacaggcgggttataaaaccttctggatcaccaaccagcagacgatgaccgcccgcaataccatgctgacggtattttcgcgccagaccgacaagcagtactacatgaaccagcaacgtacgcagagtgcgcgtgaatacgacaccaacgtgctgaagccgttccaggaagtgctgaatgaccctgcgccgaagaaactgatcattgttcatctgctgggtacgcatatcaaatacaaataccgctacccggaaaatcagggcaagtttgatggcaataccgatcatgttccgccgggattaaacgcggaagagctggagtcatataacgattatgacaacgctaacctgtataacgatcatgtggttgccagcctgattaaagactttaaagcagcaaacccgaacggtttcctggtttatttctctgaccacggtgaagaggtttacgacacgccgccgcacaaaactcaggggcgtaatgaggacaacccgacgcgtcatatgtacaccattccgttcctgctgtggacgtcagaaaaatggcaagcgactcatccccgtgatttctcgcaggatgttgatcgtaaatacagcctggcggaactgatccacacctggtcagatttggcgggcttatcttacgacggttacgatccaacccgttcagtggtgaatccgcagttcaaagaaactacccgctggattggtaacccgtataagaaaaacgcactgatcgattacgacacactgccctatggcgatcaggtgggtaatcagtaattatcagccaggcgctatttgccggatgcgacgcttgacgcgtcttatccggcctacagatcgcggcggtaggctggataaggcgtttacgccacatccggcaatacaactgccgcaatgtttacatcgaactcccctcaggccacacttttcaggtggccttttttaataatgccagttactgttttcccgtctacatacctaagggaataacatgtatcacgacgtcagctatctgctctcccgcctgatcaacggcccgctgtccctgcgccagatttactttgccagcagtaacggcccggtgcccgatcttgcgtatcaggtcgattttccacggctggaaattgtgctggaaggtgagtttgttgataccggcgctggagcaacgttagttcccggcgatgtgctgtacgttcctgctggtggctggaattttccacaatggcaagcccccgctactacctttagcgtgctgtttggcaaacagcaactcggcttcagcgtcgtgcaatgggatggcaaacaatatcaaaatctggcgaagcaacacgtcgcccgacgcggcccacgcataggttcttttctgctacaaacgctcaatgaaatgcaaatgcagccgcaggagcagcaaacggcaaggcttatcgtcgccagcctgcttagccactgccgcgatttgcttggcagccaaatccagaccgcctcacgcagccaggcactatttgaagctattcgcgattatatcgacgaacgctatgcctccgcgcttacccgcgaatctgttgcacaggcgttttatatttcgccaaattacctctcgcacctgtttcaaaaaacgggggccattggttttaacgaatacctgaatcacacgcgactggagcacgctaagacgttattgaaaggctatgacctgaaggtaaaagaagtggcgcacgcctgcggctttgtcgacagcaactacttctgccgtctgtttcgtaaaaacaccgaacgctcgccgtcggaatatcgccggcagtaccacagccaactgacagaaaaaccgactactccagaataagatgggtttgctgcggcgcagaaagcactttgcgcaccgcgctcattacccgctgcggctcacgcaggaatgcgtagatgctgcattgcacatagcggcaatgttcaaatcgctcggcaccggcaagctcgatatccgtaatcaacagagcaacatccgcccggcggatatcctcatccgctaaacgattctccgttcccagcgcgccctgagtttcaatgctgactccccacttctctaacaggcacaacttttccagccgttccgccgccatataagtatgcgccacgccgcttacgcaggcggttactgccaccaggtatgccattttaacctcccacggtaacctgaagtccggcccgttctgccatttcgcgcatcgttgccacatcagctgacgacggcgcaggcacctctttcatcgaccatgttttccccagcaggcggtatttcggttcgccgtactgatgaaacggtaacagatggatctgcctgatattcagcgggatcagtacatccagcgcctgctgcatattctcccggctgagcgtgaaaccagggatcagcggtaaacgcgggatcacgttgacgccctcactcaccagcaaacgcagattctccagcacgcgtggcaggttcatcttcaccacatcccgcgcctgagtcgcgtccataatttttaaatcgaacaacacttcatcgcacaatttcgccagcggtaatagcttgctggctggtgcgtctccggcagtttcaatggcgcatgacacaccccacagccgcagtcgctgtaaaaaacgggtagcaaactccgcctgcattaacacttcgccgccagaaagcgtgacgccgccgccggacgtgcgaaagaaaatgtcatctttcatcacttcccgttccagagcgtcaaggctgatatcgcgaccaatccgttcaaacgccccggaggggcattcatccgcatcacgcaaacatttcgcacagtgcagacatttcgcctctctgcgtaccgtctggattttgccggagatcgactccggattagcacaccacgggcaaagatgcggacagcctttaaaaaagaccaccgtacgaatgccctcgccgtcattcagtgaataacgctgaatgttgaaaatgcgcgccacatcatcgcggcgcgtttccacaacgttacagctgatgcgctgtccggcggatgatgtcatcctggatctccttcgacagttcgacaaagaaggcgctgtatccggcaacgcgcaccaccagcccggcataatcttgtgggcgctgttgcgcttcccgcaacgtgtcggcgttcaccacgttaaactgaatatgttgtaacttaagctgggtaaacgcccgtaagaagtcggccagtttgcgtaatcctgcttcaccttccagggtcgccggagtgaatttcacgttcagcaacgtaccgttagacagcagcgtgttatcgagcttactgactgacttcagtaccgctgttggcccttgtgcgtcctggcccagcatgggtgacaagccgccgtctgccagctgttctccggcaaaacgaccgtctggcgtcgcgccaaccaccgatcccaacgggacgtgagcagaaacggtatacgatcccggcgtgaagtagccgccgcgcgggttctggtatttttccacttctttgcagtagtggcgcaacagttcggcgctgatgttatccacctcgtcgatatcgttaccgtatttctcgaagcggttaattaagcgagcgcggactttttcgccttctggcgttgcgaagttggcttttaataccgacagcaattcgtcaaaacttaaacgctgttgctcaaaaaccatccctttcaacgcatggagagaatcgctcaggttggcgataccgatcccctgtacgccggagaagttataacgcgcgccgccatcggtaatatcgcggcctttttccagacaatcgctgataaacgatgagagcagcggtacaggtgcccagtcgcgatggccgatatcacaaatattgctgccctcaaccatcagggtgatgtagtggctgatcttggcgcggatctgctccagtaaaccttcataagtcagcgcagcattgccttcattttcatgcaggcagatttccatcactttcagcagattaaacatcgcgatgtcatgcaagccgtaggttctgccgggaatagataattccacacagcccactacggaatagtcgcgcgcatcttccagcgaaacgccacggttgaggaacgctggcaccaccacttcatcgttaaagatttgcggaataccggtaccgaagcgaatggtttcggcggttttcatcaggaacggcgtgtcgatcaaggcgttagtgcgcacgccgaggttcggttgcggtaattgcacgctttgataggcgtcaaggcaaaggaacgaaagcacgttcaccgcgctacgtccgttctcggttaacccgccgagcagtgcggtatagccggtcgggaaaccggcgaaataacgcgcgctactggtggagcgcaacagcacgatgtcgttgcatttcacccataaagattcgagcagttctttcaggaacgccgcatcttcgccctgggttaatgatgtctgatagaacggcaacatatactggtcgaagcgccccaacgatagcgaactggcgttggattcgtattgcagaatgatgttcatgtaccagaataactggcacgcctgccagaacgtctgcggcttatgttgcgcgttatggcgggagatctctgcaatagtcagcagctcttcgcgacgctgggcatctgtgcagtttgccgccatcgtttccgccagttcggcgtaacgcaaaatgtgtttctgcgaggcttccagcagtaacaacgcggcctgataaaagtgattctccggctgttgctgacaatgttgctgcatctgtgccaccagctcacccagcccgtgattcaacaggcgtgggtaatcaataataatgtgcccctggcctttatccgtctggttgatgctgaaaatctgcgtgttggtcgcggcttttacttcatctgtcatctgcccgttgatgaaatctttcatcgaacgtttttcccagtacgggaacaactcttcacggtagatacgtttatcttcttcgctgatagcaaagcggtcctgcggacgcgtcgggaattgatccagctctttcagcagccagtaagggtccatttccggcgacataatcccggcgcgcggttttacggtgcggttaccggcaatcagttcttcatcacgaatcgaaatttcaacatgttcaaggatatacgctgttgctttcgcccggcgcaatatcaccggttcgccttcggtttgccgatggctggcggtataaagcagcgcccgctccagcgagatttcacgggtattggcaaacagtgcagttttgaggcgagagatacgattcgtcatgaggaactcctgtgggaaagcgaacccgcccttgcgagcgggagaagaacttaagcggtttgcgccaggtgagcttcaattttgctcataatggcgtcagcacgttttactgcatcgctgatgttgacgcgcacgatggtcttgccagcaaaacgctcttcaaacttgatgccgatatctttggtcagaatcaccatatcagcgctcgccacatcttccgcagtcagttcattttccagaccaattgacccctgggtttctactttcacttcccagcctttcgctttcgcggcactttccagcgcctctgctgccatataggtatgggcaacacctgaaggacatgcggttactgcaataattttcgtcatggctcgttcctcaattaattaatttcaaaatccaaatccaggtcgtcttctttttcatcagtcgaagacccatttttacgcgccagacttttcagcacgttcacacaaacagccgtcaccactgctccgacagccactgctgcgatataacccagcttgccttcaaccaccggcagcacaatcagaccaccccagcctgcatagcactgcgcaccgaccagcgccgcagttactgcaccacaaactgaaccgaccatgatggaaggaatgacacgcagcggatcggcagcggcgaaaggaatcgccccttcagtaacgccaacacagcccatcaccagtgccgctttgccggtttcgcgctcttctgcggagaaatttttacgaccaatcagcgtcgccagccccatccccagcggcgggatacaaatacccacggcagcgatggccaccacggtataaacaccctgagcaacgcaaatcagcatgaaggcataggccactttgttaaccggaccgcccatatcgaacgccagcatcagacccatgatcaccgccagcataacaatgctgccctgctgcatcccctgaagccactgagtcaggctgttggtcaacgcccctacaggctcgcccaagccccacatcatgatgcctgcggtaatcagtgtgccgacgataggaataatgaagataggcatcaccgagcgcagaactttatgcaccggaattttcttcaggtaatgcaccacgatgccgccgataatcccggcgatcagtgcaccaaagaagcccgcaccaaagctgttaccaacccaggcaccgatagcgcacggagccagcgcagaacgctctgcaatggaataaccgatgtacgctgcgaggaaaggcaccatcagcgtcaagcccgcaacgccgatatcaaacagttttttcagatttggatcggctacggcatccggcactgcgcctttgccatacaacatgacggaaaccgccagcaaaataccgcccgataccacgaagggaatcatgtgtgaaacgcccgtcattaaatgctgacgggtatttttcaggatctgcaccaactcattcataagctgctcccgggcttgcgaaagcccatgtccatatttttgatggaggaaacaataggcaatcgcaggcggagcaaacagtggataaaaaggccatttactggacttttgtaatatcagtacaaaaatgcgatccgcctcataacttgcgataaaccggaagcatgccgcaaaacagcgtcttgtgagacgcgtcgcaaattgacggttacattacatttgtccagcttttggcagatttgtcacatggcaggccgttgccgtgcgctcttatcctgtaaacagaaaaccgtaccgggagagaggcaatggccctgattgtggaatttatttgtgagctacctaacggcgtacatgcgcgtccggcaagccacgttgaaacgctgtgtaatactttttcatcacaaattgagtggcataacctgcgcactgaccgcaagggcaacgccaaaagcgcccttgcgctgattggcaccgatacgctggcgggcgataactgccagttactgatttccggggccgacgaacaggaagcgcaccagcgtttaagccaatggctgcgcgatgaattcccccactgcgatgcgccgctggcggaagttaaatctgacgaactggaaccactgccggtttcactgaccaatctgaatccgcaaattatccgcgcccgcaccgtgtgcagcggtagtgcaggcggcattctgacgccgatctcttctttagatctcaatgcgctgggtaatcttcccgcagccaaaggcgttgacgccgagcaatccgcactggaaaacggcctgacgctggtactgaaaaacattgagtttcgtctgctggatagcgacggtgctaccagcgcgattctggaagctcaccgatccctggctggcgatacttccctgcgcgaacatttactggcaggcgtcagcgccggattaagctgcgccgaagcaattgttgccagcgcgaatcacttttgcgaagagttttcccgttccagcagcagctacctgcaagaacgtgccctggacgtacgcgacgtctgcttccagttactccagcaaatctacggtgagcaacgcttcccggcaccgggcaaactgacgcagcccgccatttgtatggctgatgaactgacccccagccagttcctcgaactggataaaaatcacctcaaaggattgttgctcaaaagcggcggcaccacctcacatacggtgatccttgcccgttcgttcaacattccaacgctggttggtgtggatattgatgcccttactccgtggcagcaacaaacgatttatatcgacggcaacgccggggcgattgtggttgagccaggggaagccgtagctcgttattatcagcaagaagcccgcgtacaggacgccctgcgtgagcaacagcgtgtctggctgacccaacaagcccgtaccgctgacggtatccgcattgaaattgccgctaacatcgctcactccgtggaagcgcaggccgcattcggcaatggtgcggaaggcgttggtttgttccgcactgaaatgctctatatggatcgcaccagcgcaccgggcgaaagcgagttgtacaacattttttgtcaggcgctggaatccgccaacggacgcagcattattgtgcgcactatggacattggcggcgacaaacccgttgattatctgaacattcccgcagaggcaaacccgttcctcggttatcgcgccgtgcgtatttatgaagagtacgcgtcgttgtttaccacgcagctacggtcgatcctccgcgcctccgctcacggcagcctgaaaatcatgatcccgatgatctcctcaatggaagagatcttatgggtgaaagaaaaactggcggaagccaaacagcaactacgtaacgaacacattccgtttgatgagaaaatccagctcggcatcatgctggaagtgccgtcggtgatgttcatcatcgatcaatgctgcgaagagattgatttctttagtattggtagtaatgacctgacgcagtatctgctggcggtggatcgcgataacgctaaggttactcgtcactacaacagcctgaatccggcattcttgcgggcgctcgattacgccgtgcaagcggtgcatcgccagggcaaatggattggtctgtgcggtgagctgggagcgaaaggttccgtgctgccgttgctggtcggcttagggctggatgaactcagcatgagcgcaccatcaattccggcggcgaaagctcggatggcgcaacttgatagccgtgagtgccgcaagttgctcaaccaggcaatggcctgccgtacttcgctggaagtagaacacctgctggcgcaattccgcatgacccaacaagacgcaccgctggtcaccgccgagtgcatcacactggaaagcgactggcgcagcaaagaagaagtgctcaaaggcatgaccgataacctgctgctggcgggccgctgccgctatccgcgtaaactggaagccgacttgtgggcgcgcgaggccgttttctctaccggtctgggctttagttttgccattccacacagcaaatcagaacacattgagcaatccaccatcagcgtggcgcgtctgcaagcgccggtgcgctggggcgatgatgaagcgcaattcatcattatgttaaccctgaacaaacacgctgcgggcgatcagcatatgcgcattttctcgcgcctcgctcgccgcatcatgcacgaagaattccgtaacgcgctggttaacgccgcctctgccgacgctatcgccagcctgctgcaacatgaactggaactgtaaaaggaaacatcatggaactgtatctggacaccgctaacgtcgcagaagtcgaacgtctggcacgcatattccccattgccggggtgacaactaacccgagcattatcgctgccagcaaggagtccatatgggaagtgctgccgcgtctgcaaaaagcgattggtgatgagggcattctgtttgctcagaccatgagccgcgacgcgcaggggatggtggaagaagcgaagcgcctgcgcgacgctattccgggtattgtggtgaaaatcccggtgacttccgaaggtctggcagcaattaaaatactgaaaaaagagggtattactacacttggcactgctgtatatagcgccgcacaagggttattagccgcactggcaggggcaaaatacgttgctccgtatgttaaccgcgtagatgcccagggcggagacggcattcgtacggttcaggagctgcaaacgctgttagaaatgcacgcgccagaaagcatggtgctggcagccagctttaaaacgccgcgtcaggcgctggactgtttactggcaggatgtgaatccatcaccctgcccttagatgtagcgcaacaaatgctcaacacccctgcggtagagtcagctatagagaagttcgaacacgactggaatgccgcatttggcactactcatctctaaaggagcaattatggaccgcattattcaatcaccgggtaaatacatccagggcgctgatgtgattaatcgtctgggcgaatacctgaagccgctggcagaacgctggttagtggtgggtgacaaatttgttttaggttttgctcaatccactgtcgagaaaagctttaaagatgctggactggtagtagaaattgcgccgtttggcggtgaatgttcgcaaaatgagatcgaccgtctgcgtggcatcgcggagactgcgcagtgtggcgcaattctcggtatcggtggcggaaaaaccctcgatactgccaaagcactggcacatttcatgggtgttccggtagcgatcgcaccgactatcgcctctaccgatgcaccgtgcagcgcattgtctgttatctacaccgatgagggtgagtttgaccgctatctgctgttgccaaataacccgaatatggtcattgtcgacaccaaaatcgtcgctggcgcacctgcacgtctgttagcggcgggtatcggcgatgcgctggcaacctggtttgaagcgcgtgcctgctctcgtagcggcgcgaccaccatggcgggcggcaagtgcacccaggctgcgctggcactggctgaactgtgctacaacaccctgctggaagaaggcgaaaaagcgatgcttgctgccgaacagcatgtagtgactccggcgctggagcgcgtgattgaagcgaacacctatttgagcggtgttggttttgaaagtggtggtctggctgcggcgcacgcagtgcataacggcctgaccgctatcccggacgcgcatcactattatcacggtgaaaaagtggcattcggtacgctgacgcagctggttctggaaaatgcgccggtggaggaaatcgaaaccgtagctgcccttagccatgcggtaggtttgccaataactctcgctcaactggatattaaagaagatgtcccggcgaaaatgcgaattgtggcagaagcggcatgtgcagaaggtgaaaccattcacaacatgcctggcggcgcgacgccagatcaggtttacgccgctctgctggtagccgaccagtacggtcagcgtttcctgcaagagtgggaataacctactccaaactcccggcttgtccgggagtttgaacgcaaaattgcctgatgcgctacgcttatcaggcctacgcaatctctgcaatatattgaatttgcgtgcttttgtaggccggataaggcgttcactccgcatccggcactctgtgccagtaatctgaaactcccacgttgttcaggaattttttatccgcttctggacattttctctacagaacaatcgttagcccggaaggtcgaatctgtgactcttattttcacggacgaaccagatgaaagcttcactggcgctgctcagcctgctaacggcatttaccagccactccttaaaatctcccgccgttccaccaaccgtggtacaaatccaggccaataccaaccttgccatcgcagacggtgccagacagcaaattggcagcacgctattttacgatccggcgtatgtgcagcttacttatcctggcggtgatgttccgcaagaacgcggtgtatgttccgatgtggtgatccgcgcattgcgcagccagaaggtcgatttgcagaaactggttcacgaagatatggcgaagaattttgctgagtacccgcaaaaatggaagttaaagcgcccggacagcaacatcgatcaccgtcgggtgcctaatctggaaacctggtttagccgccatgataaaacacgccccaccagcaagaaccccagtgactatcaagcgggcgatattgtctcctggcgactggataacgggctggcacatattggggtggtttcagatggcttcgcccgcgacggtacgccgctggtgatacataacattggcgcaggcgcgcaggaagaagatgtgctgtttaactggcggatggtggggcattatcgttattttgttaaataagagatcgccccacatgaagaaaaaattcagatcctttttacactgacggcttcttttttcttacggctcaccagcgccagtgccagcacaatcagcacaataccgctaccttcaacggcccccggattctcgccgagcagccaccaggaaaagagtacgccgcaaacgggaacggccagtgtgcttaagctggcaatactggcaggcaagtttttcaatacaaacaaccataagctccacgccagtgccgtcgccagaatcgcactgtaggccagcgcccagaacacggtgggctgccagtcaatttcacgttgcggcaccagtaaagcgaccacactcatcaccagcgccgcatacagcatctgccaggatgttaacgacaataaatccacgcgcggatgacgggcatacagacgtttagcaacaatcgcgctcgccccccaactgacgccggagaggattgccagcatggcacttttcatcgaagagaaatcgagttgccacggctgcaacaccaaaaataagccgaaagcggcaatcagaatcgcgaaatattgcccacgtcgcaggcgttcaccgagaaacaacgcggcgaaaatcaccacccagaacggcatggtatagctcaggatcgccaccttccccgcacctccgctgaccaacgcccactgcgccagaccaaccatcccgcaggtttgtaacagggcaatggctaaggtgtatttaaacggtgtcgggcgcattccgcgaccacgtaataaaaggacgatgaataaaacgagagcgccgaaaatgcagcgtaaggcggtaaagtcgaaggcaccgatgtaactggtgacttgcttcatgaaaatccagctataactccagataagtgtgagcacaaccaggccactgattgccagtgggttgctctttcctgcggcagacatgagagatccagtgtgtagttttcgttcgcccactatacgctggtaaagaacgttcagcgactgccagcaagcagccgctgaacggggtcagattacagcaggtcgaaacggtcgaggttcatcactttcacccatgccgccacgaagtctttaacaaacttctcgtgggcatcgctactggcgtaaacttccgccaccgcacgcaggacggagttagaaccaaacaccagatccgcacggctggccgtaaatttcacttcgccggtttcacggtcacggccttcgaacagctctttcgattcgtcggtcgctttccactcgtaacgcatatccagcaagttcacgaagaagtcattgctcaatacgccaacgcggtcagtgaagacgccgtttttgctgccatcgaagttggcacccagtacacgcatgccgcccaccagcgcagtcatttccggcgcggtcagcgtcagttgctgtgctttgtcgatcagcagtgactcggtggtggaaacgtccagacgagcgcgatagttacggaaaccgtcagcaattggctccagcagctcaaacatctcaatgtcagtctgatcctgacgcgcatcaacgcgacccggcgcaaacggtacatgaatgctcaaacctgcggcgcttgcggctttctcaacaccaaccacaccagccagcactatgatatccgccagcgaggctttaccagactctttctggattttctccagaacaggcagagcacgaacggctgcggcgttcacatcccagtcgcgctgcggcattaatgccagacgcgcaccgttggcaccaccgcgtttgtcgccaccacggaaggtagaagcagatgcccaggccaccgataccagctcactaacagacagaccagaatccgcaatcgcgaatttcagatcgataatgtcctgctcggtcgggttgtagatcggctgcggcagcggatcttgccagatcagatcttctttcggcacttccggcccgatgtagcgagatttcggccccatatccctgtgcgtcagtttgaaccaggcacgggcaaaggcttcgttgaacgcctgcggatcgttgaggaaacgacgagagatcttctcgaactcaggatcaaaacgcagcgtcaggtcggtcaccagcattgtcggtttacgtttcttcgacggatcaaacggatccgggataatttccggtgcgtctaccgcttcgaactggattgcgccagccgggctgcgggtctgtacccactcatacttgaacaggttctcgaagaaatagttgctccactgggtcggcgtctgggtccagactacttccagaccagaggtaatggcatctgcgccaacgccgctgccgtaagtgctcgcccaacctaaaccttgttcttcaatcggtgcagcttctggatcaggacctacatttgatgtcggaccggcaccgtgggttttacccagcgtatgaccacccgcaatcagcgccacggtttcttcgtcgttcatgcccatgttgccgaaggtcgcgcggatagctgctgccgcagaaagcggttcgccgctgtgatccgggccttccgggttaacgtaaatcagacccatctcggttgcacccagcggtgctttcgccagcgcttccggatgacggtgagtcagccaggctttttcatcaccccagttaacatccagatccggttcccagacgtcttcacgaccggcaccaaaaccgaaggtacggaagccggagttttctagcgccacgttacccgcgaggataaacaggtcggcccaggagattttctgaccatatttctgtttgattggccacaacaggcgacgcgctttatcgaggcttacgttatccggccaggagttcagcggtgcaaaacgttgctgaccacgacccgcgccaccgcgtccatcgattgaacggtaagtccccgcgccgtgccaggccatacgaataaacagaccggcgtaactgccccagtcggctggccaccacggttgagattctgtcaacagggctttcagatcttttttcaggccgtagtaatctaatttgctgaattctttgcggtagtcaaagtcctcacccagtgggttagaacgattagaatgttggtttaacaggtcaacacgaagttgatttggccaccagtcgcgagtggttgtgcccgcccccgcactctggtcgtgaccgccctgatggaacgggcatttgccagtggctgtggtgttatggatatcgtctgacgtgctcatcaatgtgctcccctctacagtgttaccgttacgatacacagcgttagagagaagttataattgaattaatccacggatgcgatagttgagatcttacatattgttggttaaagagatgtagatcaaattgatcttaattaagcttttttgattatgtccgaattcggacaaatgctttataaaaaagggttttagcttcatatccttcaagtaatgagggagaaaacaaggctgataaccttattttcccgccctcatttcgaggcagcattttgtgctctgtttaaaatttgtgatcactgtgtgattttcacaaaagccacactatttataaaccaggtcgaacccccagcgtatggcaaatcgcgtaactcatttcagcacggttaagcgtatagaagtggaaatctttcactccttcacggcttaaaatcttcaccatatccatggcaatattcgcgccaaccagtttgcgggtttcggcatcatcatccagaccgtcgaacatttgcgccatccacgccggaatacgcacgttggtcatatcggcaaatttcttcgcctgtttaaagttagataccggcaaaattcccggaataatttccacatcaatgcccgccgatacacagcggtcacgaaaacgcaggtagctttcgacatcgaagaagaactgagtaatcgcgcggttggctccggcatccactttgcgtttcagattaagcaaatccgcctgagcgctttttgcttccgggtgaacttccggatacgccgccacggagatatcgaaatctgccacttcttttaacagcgtcaccaggtcagaagcatacatttctggcttaccacttcccggcggcagatcgccacgcagcgccacgatatgacgaataccgttattccagtagtcgcgtgcaatggtgcgcagctcgtcgggcgtcgcatcaatgcaagtaagatgcggtgccgcttccagaccagtgcgatctttaatgcctttaataatgctgtgcgtacggtcgcgctcgccggagttcgcgccataggtcaccgatacaaacttcggtttcaggctgctaaggcgatcgatggagttccacagggtctgctccatttcactggtacgcggcgggaaaaactcgaacgaaacgttaatctgcccctggacttctgccaggctctgattcagggcatcccgctggctggcgtgaaaaaagctcataccttacctcatcaatcgcttgtagttatatgttgtgttgtgcacatctatccgtttagacgtccagatgtaaagatgaaggaaaagccgaagggcgtcaaccgaaaaatgaccaatgatggtgaggaaaaatcagggaagatgaaaaaacttcaggatggtaagaaaaagaaaatccggtatgcaaagcaaaccggactgcaaatataaactaaccatgtacttattgcttcttgccggattcgtcgtaaacgcttaatccggcctaatcctatgataattcaatatatttcattagaaaccataaacccgaaaacatgagtaccgggcattattaaatttctgaaattacaacaactgtgccagccggttgatatccgactgaatcgccccggcggtgacgtcgcgcccagcgccaggtccgcggatcaccagagggttatcgcgataccagcggctttcgatggcaaagacgttatcgcacggcagcagtgatgccaacggatgatcttcacgcaccgcttccacgcctacacgcgctttaccgttggcatcgaaacgcgccacgtagcgcagcaccagccccatttcgcgggccgcttccagccgttgcaccatctgctcgttcagttcatcgccattttcaaagaaatggtcgatgctgccgccttcgcaatgagcaggcaccagcgattccacacgtacctgatccggttcgatgttgtaacctgcttcacgcgccagaatcaccagcttgcgcatcacgtctttgccagagagatcgtcacgcgggtcaggttcggttaagccctgctgccacgcctgatccaccagctcggtaaacggcacgctaccgtcgaattgcaggaacagccaggagagcgtgccggagaagatcccgctgatcgacaaaatagtatcgccgctgtcgatcagatcgcgcacggtgtggttgatcggcaagcccgcaccgacggtggcattgtacagccagtgacgcccggttttttcgaaggcgtcgtggatctggcgatatttattgctgtcgctggctcccgccagtttgttggcgctgataacgtggaaaccgtggctggcgaaatcaagatactgatcagcaagctgctggctggcggtaacgtccagcaccactaaatcatcatacggatgggcgcgcatccacaggaacaacgactcttcatcctgctcaaccgcttcatcgttgaagaaggctaacgcgcggctggcgtccagcccgtcatagctcaacaggctgcggcggctgtccaccacacctgccagcacaaactcaaagccggtacgtgccgaaagcgtgctctgctcacgggcgaacagttccagccaacgggaaccgatattgcccttaccgaacaataccaggccgatgcgtttttctgcgcggaagacggactgatgcagcccctgaatcaggctttcggtcgggccggtgcgcagtactgccaccaggctgatgccgtcatcggactgccaggtaaattcgaccggctggcctttcagttgctgccagaagcggtggcaatgcagcgggttacgggtgacgcctgcaccgaccatcgccaccagcgccagcccctgacgcaggcgcagttcgccaggtaatcccgcttcgtcgaggattttcagcgcactgtcggccacttctgaggtgtagcaaaattgcagcaactggcgatcgttatgtacgccaaccgccagcgggcgtacctgcgcgcgtttcaggatttggtcgatctctttatgcgccagtttgaaatcctgactggcgggcacctgaaactcaatcaaacagacatcatcgtggctggtgacaatacgcgcaccagtaccggaggccagcacgcgttcaatgcgcgtggaaccttgatccggcgtgtagctacagcgcagttgcaggtcgatttcgctgccagaaaccggctgtaaagtacgggcgtgaagaacgggagccgccaggcgcgccagttcgctggcctcatccagacgcagcaacggcagcaggcaggcatctttcactttacgcgggtcggcactgtataccccggcgacgtcgctccagatggttacgcgagaaacacccgccagcgcaccgatttgtgtcgcggaatagtcggaaccgttacgccccagcagcaccgtttcaccggcgttgttgcggctgataaatccggtcaccaccagacgtttgcccggatgttgcaccagcagctgttgcagcaacgggtaagaaagcccttcatcaacctgcggttgtgcggcgcgttcagcgcgtaaaaactcgcgggcatcaagccaggccgctggcagcccttgttgattaagtaccgcagacatcagacgtgccgaccatacttccccgtggcccaccacttccgcatacactgcgtcgttaataccgctgtcgagcagcgccgccaggcgctcaaggtcgctgacaaaagcgctaatgaggctatcggcttcttcagcgggtagcagaccgctaatcagatcgcactgatagcgacgcagcgtttgttgaacctgatgcgcagagagacgatcggtctggcttagtttcaaccagttaatcaactggttagtggtgctaccggcggcggaaaccaccatcatatcgtcaggctgagagtactccgccataatgcccgcgacacgcaaataacacttcacatcagccagactactgccaccaaatttatgcagctgacgacctttcgcccctgcctgcgcaatcacactcatttttaccccttgtttgcagcccggaagccattttccaggtcggcaattaaatcttcgccatcttcaataccggtggagatacgcagcagcgtctcggagatcccggcggcagcacgcgcttctggtgccatgcctgcatgtgtcatggttgcggcgtgagagattaaactttccactccccctaatgattccgccagcgtaaacaacgacagcccgcccaggaaacgacgcagcgtctgctcatcgccatccagttcaaaactcaacattgcgccaaagcctttttgctggcgcgcggcaatttcatgcccctgattttccggcaacgacgggtgatacagttttttcaccaacggctgggtttgcaggtatttcacaatcgcctgcgcgttgcgctgcgccagctccatacgcggcaccagcgttcgcaacccacgtagcagcagatagctgtcaaacgcgccgcccgtcacgccaatattgtttgcccaccaggccagttcagtgacaacgtccgggtctttagcaatcaccacgccggccactacgtctgagtgaccgttcagatatttcgtgcatgaatgcaacaccagatcggcacctaatgccagcggattttgtaatgccgggcttaagaaggtgttatccaccacgctcaccgccccgacttcccttgccagatggcagattttcgcaatatccacgacgcgtaacaatggattacttgggctttctaccagtaccagtttgggtttttctgccagcgctgcccgtaatgcctgttcatcgccttgatcaacaaacaacacgcgatagcaaccgcgtttcgccagactgtcgaacaggcgatagctaccgccgtagcagtcgtgcggcgcaaccagcagatcgccaggtttcaaaaagacggtcgttaccaggtgaatcgcggacatgccggtattagtaagtactgcaccagcaccaccttccagttctgccagcgcacgctgaaccacatcgcgcgttgggttgccgcgacgcgagtaatcatgcgcgcgcggttcattaaatccggtaaagttataggtgctggaaagatggatcggtgggacaacgcaaccatactgttcgtcgtcatttaacccgctacgcactgcgatggtggcctgtttacgcgtcatgtgatgaagttccctgggctttgtcggtgaaatgtcaggcaccagagtaaacattgtgttaatggacgtcaatacatctggacatctaaacttctttgcgtatagattgagcaaatcccaaatagccgttaaaattatatgcattatcacgccgacaggtgcattacacgatgtcacggtaacgcctgtacggtaaactatgcgggtttacggtcagtacccacatcaactgtgtggtctggtctcaatttattgacgaagaggattaagtatctcatggctgaatggagcggcgaatatatcagcccatacgctgagcacggcaagaagagtgaacaagtcaaaaagattacggtttccattcctcttaaggtgttaaaaatcctcaccgatgaacgcacgcgtcgtcaggtgaacaacctgcgtcacgctaccaacagcgagctgctgtgcgaagcgtttctgcatgcctttaccgggcaacctttgccggatgatgccgatctgcgtaaagagcgcagcgacgaaatcccggaagcggcaaaagagatcatgcgtgagatggggattaacccggagacgtgggaatactaaagcaaaaaagagcggcgcggagtggaatcgcctgatgcgctacgcttatcaggcctacgtcatattgcaatttattgaatttgcacgaacttgtaggccggataaggcgttcacgccgcatccggcataaacaacgagcacgttgtctgcgacccaccgctttttatacatggacgtttaactatgaaaaacaggctgctgatcctcagcctgctggtttctgtacctgcctttgcctggcagccacaaaccggcgacatcatctttcagatctctcgctcatcgcaaagtaaagcgatccaactggcgacccataccgattatagccacaccggtatgctggtgatacgcaacaaaaagccctacgtttttgaagcagtcggcccggtgaaatacaccccgctcaagcagtggatcgcccatggtgaaaagggcaaatacgttgttcgccgcgttgaaggcggactgagtgttgaacaacagcaaaaactggcgcaaacggcaaaacgttatctcggtaaaccgtatgatttcagcttctcatggagcgacgatcgccagtactgttcggaagtggtgtggaaggtttaccagaacgcgctgggaatgcgcgtgggcgagcagcagaagttgaaagagttcgacctgagcagcccacaagttcaggcaaagctcaaagaacgttacggcaagaatattccgcttgaggaaacggtggtctcgccacaagccgttttcgatgcgccacaactcaccacggtcgccaaagaatggccgctgttttcgtggtaatacgaccaaaattcaggcacaaaaaaagcgccgtgcggcgcttttttcggaaatccggtcttatttgctgcccgggatgttgaaacgcttgttgaagcggtcaacacggccaccggtagcaacatcacgctgtttgccagtgaagaacgggtggcacttgctgcacacgtcgaggttcaggtcatgaccaacggtggagcggattttcattacgttaccgcaagagcagctagcagtaatttcttcgtatttcgggtgaatatcttttttcatgggaaaacctcggtttaaggccgcgtcgctcttccagccctaacgccagacaccacgcgatgttaaaagtatagcttcaatacgatcatttcgtacgaaggcgcgaaatcatacagaaattaaccagcgtatgcaaactgatccgcactcttctacggcaatgtgtatactaacccaccgaatttcaagtcaggatgatgctatgcccgttgcccacgttgccttgcccgttccgcttcctcgtacctttgactatctgctgccagaaggcatgacggttaaagctgggtgtcgcgtgcgcgtgccgtttggcaaacagcaggagcgcatcgggattgtggtatcagttagcgatgccagcgaactgccgctcaatgagctaaaagcggtagtcgaagtgctggatagtgagccggtgtttactcactccgtctggcgattgctgctatgggcggcagattactatcatcatccgattggcgatgtgctgtttcatgccttgccgattttactacgccaggggcggcctgcggcgaacgcgccgatgtggtactggtttgccactgaacaaggccaggcggtggatctgaacagcctgaaacgctcccccaagcaacaacaggcgctggcggcgttacggcaaggcaaaatctggcgcgaccaggtcgccacgctcgaatttaatgatgccgcgttgcaggcgctacgcaaaaaaggtctgtgtgatttagcaagtgaaacaccagagtttagcgactggcgaacgaactatgccgtttctggtgagcggttgcgattgaataccgaacaggccaccgccgttggcgcaattcatagcgcggcagatactttttctgcctggctgctggcgggcgttaccggttccggtaaaacggaggtttatctcagcgtactggaaaacgtgctcgctcagggcaaacaggcgctggtgatggtgccggaaatcggcctgacaccgcaaactatcgcccgttttcgtgaacgttttaatgcccccgtggaagttctgcattccggcctgaacgacagcgagcgtctttcggcgtggctgaaagcgaaaaatggtgaggcggcgattgtgatcggcacccgctccgcgctgtttacgccgtttaaaaatctcggcgtgattgtcattgatgaagagcacgacagctcctacaagcagcaggaaggctggcgctatcatgcccgcgacctggcggtgtatcgtgcgcacagcgagcaaatcccgattattcttggctccgcaacgcccgcgctggaaacgttatgcaacgtccagcagaaaaaataccgcctgctgcgcctgacccgtcgggcagggaatgcgcgtccggcaattcaacatgtgctggatttaaaaggtcagaaggtgcaggcaggtctggctccggcgttaatcactcgtatgcgccagcatttacaggctgataaccaggtcattctctttcttaaccgccgtggctttgcgcctgcactgctgtgccacgactgtggctggattgccgaatgcccacgttgcgatcactactacacgctgcatcaggcgcagcaccatctgcgctgccaccactgtgacagtcagcgtccggtgccgcgccagtgcccttcctgcggttccacgcacctggtccccgtggggctgggcaccgaacagcttgaacagacgctcgcgccgttgttccccggcgtgcccatttctcgtatcgaccgcgataccaccagccgcaaaggggcgctggaacagcaactggcagaagtacatcgcggcggcgcgcggattttgattggtacacaaatgctggcgaaaggtcaccatttcccggatgtgacgctggttgcattactggacgtggacggcgcgctgttttctgccgattttcgctcggcagagcgtttcgctcagctttacacccaggtcgccggtcgtgccgggcgtgcgggtaaacagggcgaagtggtgctgcaaacgcaccatccggaacatcctctgttgcaaacgttgctctataaaggctacgacgcctttgccgaacaggcgctggctgagcggcgaatgatgcagctaccgccgtggaccagccatgtgattgtgcgtgcggaagatcataacaatcagcacgcgccattgttcctgcaacaactgcgtaatctgatcctctccagcccactggcagacgagaaactgtgggttctcggtccggttccggctctggcacctaaacgtggcggtcgctggcgctggcagatattgttgcagcacccttcccgcgtgcgcttgcaacacatcattaacggtacgctggcgctcatcaatacaataccggattcccgtaaggtgaaatgggtgctggatgttgatccgattgagggttaaaccgctcacgatgcgaggcggatcgaaaaattcaatattcatcacacttttcatgaaaattctgtaaccgttttcacgcgctatctgctaaaaatgttgccgatgtgaagtaaacatggatgtagtacgcctgacgtgccaggcgaggagtgagtgtgaaagcgaagaagcaggaaactgccgcgaccatgaaagacgttgccctcaaggcaaaagtctctacagcgaccgtctcccgagcattaatgaatcccgataaagtctcccaggccacccgtaatcgggttgaaaaagcggcccgggaagtgggttatttaccgcagcctatggggcgcaacgtcaagcgtaatgaatcccgcaccattctggtgattgtcccggatatctgcgatcccttctttagcgaaattattcgcggtatcgaagttacggcggcaaatcacggatatctggtgctgattggcgactgtgcgcatcaaaatcagcaggaaaaaacctttatcgatttgatcatcaccaagcaaattgatggcatgttgttgctgggttcaaggctgccgtttgatgccagcattgaggaacagcgtaatctgccgccgatggtgatggcgaacgaatttgcaccggagctggagctgcctacagttcatatcgacaatctgaccgccgcatttgatgcagtaaattatttatatgagcaagggcataaacggattggctgtatagccggtcccgaagagatgccgctgtgtcactaccgcctgcaaggctatgttcaggcgctgcgtcgctgcggcattatggttgatccgcaatacatcgcccgtggcgacttcaccttcgaagccggaagcaaagcgatgcagcagctgcttgatcttccacaaccgcctactgctgtcttctgccatagcgatgtgatggcgctcggcgcactttctcaggcaaaacgccaggggctgaaagtcccggaagacctttccataatcggttttgataacatcgacctgacgcaattttgtgatccgccgctgacaaccatcgcgcagccgcgttacgaaatcggtcgggaagctatgctgttattgcttgatcaaatgcaggggcaacacgttggcagtggctctcgtttaatggactgcgaacttatcatccggggatcaacacgcgcgttaccttaaagtaaacctttaagactgccgtgactggtcaaaggcccgccgcttaagtaacatggcgggctgacgaacgaataaatacagcgaaacgatagtggcacaacgagattatgtacgccgcagccaaccggcaccttcgcggcgaaaaaagagcacctcacggaaaaagcaacgaaatctgcctgcggtttctcccgctatggtcgctattgctgccgccgttcttgtgacctttatcggtggtctgtacttcattacgcatcacaagaaagaagagtccgagacgctgcaaagccagaaagtgaccggaaacggactaccaccaaaaccagaagaacgctggcgctacattaaagagctggaaagtcgccagccgggagtgcgtgcgcccacagaaccttctgccggtggtgaagtgaaaacgccggagcaactgacaccagaacaacgtcagcttcttgaacaaatgcaggctgatatgcgccagcagccaacgcagctggttgaagttccgtggaatgaacagacgccggaacagcgtcagcaaacgctacagcgccaacgtcaggcgcagcaattagcggaacagcaacgcctggctcagcagtcgcgtacgactgaacaaagctggcagcagcagacgcgtacgtcgcaagccgcaccggtacaggcgcaaccgcgccagtctaaaccggcttcttctcagcagccgtaccaggatctgctgcaaactcctgcgcacacgactgcgcagtcgaagccgcagcaagctgcgccagttgctcgtgccgctgacgcgccaaaaccgacggcggagaaaaaagacgaacgccgctggatggtgcagtgcggttcgttcagaggcgcggaacaggcagagacggtacgtgctcagctggcgttcgaaggctttgactcgaaaatcaccaccaacaatggctggaatcgtgtggtcattggcccggtgaaaggcaaagagaacgcagacagcaccctcaatcggttgaagatggcgggtcatacaaactgcattcggctcgccgccgggggttgaaaccctcaaaatcccccccatctataattgcattatgccccgtacttttgtacggggtttgtactctgtattcgtaaccaaggggtcagctcgtgacaactatagtaagcgtacgccgtaacggccatgtggtcatcgctggtgatggtcaggccacgttgggcaataccgtaatgaaaggcaacgtgaaaaaggtccgccgtctgtacaacgacaaagtcatcgcgggctttgcgggcggtactgcggatgcttttacgctgttcgaactgtttgaacgtaaactggaaatgcatcagggccatctggtcaaagccgccgttgagctggcaaaagactggcgtaccgatcgcatgctgcgcaaacttgaagcactgctggcagtcgcggatgaaactgcatcgcttatcatcaccggtaacggtgacgtggtgcagccagaaaacgatcttattgctatcggctccggcggcccttacgcccaggctgcggcgcgcgcgctgttagaaaacactgaacttagcgcccgtgaaattgctgaaaaggcgttggatattgcaggcgacatttgcatctataccaaccatttccacaccatcgaagaattaagctacaaagcgtaaggatctcccatgtctgaaatgaccccacgcgaaatcgtcagcgaactggataagcacatcatcggccaggacaacgccaagcgttctgtggcgattgctctgcgtaaccgctggcgtcgcatgcagctcaacgaagagctgcgccatgaagtgaccccgaaaaatatcctgatgatcggcccgaccggtgtcggtaaaactgaaatcgcccgtcgtctggctaagctggcgaatgcgccgttcatcaaagttgaagcgaccaaattcaccgaagtgggctacgtcggtaaggaagtggattctattattcgcgatctgaccgatgccgccgtgaaaatggtacgcgtccaggctatcgagaaaaaccgttatcgcgctgaagaactggcagaagaacgtattctcgacgtgctgatcccacctgctaaaaacaactggggacagaccgaacagcagcaggaaccgtccgctgctcgtcaggcattccgcaaaaaactgcgtgaaggccagcttgatgacaaagaaatcgagatcgatcttgccgcagcaccgatgggcgttgaaattatggctcctccgggcatggaagagatgaccagccagctgcagtccatgttccagaacctgggcggccagaagcaaaaagcgcgtaagctgaaaatcaaagacgccatgaagctgctgattgaagaagaagcggcgaaactggtgaacccggaagagctgaagcaagacgctatcgacgctgttgagcagcacgggatcgtgtttatcgacgaaatcgacaaaatctgtaagcgcggcgagtcttccggtccggatgtttctcgtgaaggcgttcagcgtgacctgctgccgctggtagaaggttgcaccgtttccaccaaacacgggatggtcaaaactgaccacattctgtttatcgcttctggcgcgttccagattgcgaaaccgtctgacctgatcccggaactgcaaggtcgtctgccaatccgcgttgaactgcaggcgctgaccaccagcgacttcgagcgtattctgaccgagccgaatgcctctatcaccgtgcagtacaaagcactgatggcgactgaaggcgtaaatatcgagtttaccgactccggtattaaacgcatcgcggaagcggcatggcaggtgaacgaatctaccgaaaacatcggtgctcgtcgtttacacactgttctggagcgtttaatggaagagatttcctacgacgccagcgatttaagcggtcaaaatatcactattgacgcagattatgtgagcaaacatctggatgcgttggtggcagatgaagatctgagccgttttatcctataatcgcgttcaatcattttcatcattgtttgatggggctgaaaggccccatttttattggcgcgtattatgactgaacaacaaattagccgaactcaggcgtggctggaaagtttacgacctaaaaccctccccctcgcctttgctgcaattatcgtcgggacagcgctggcatggtggcaaggtcacttcgatccgctggtcgccctgctggcactaattaccgccgggctattacagatcctttctaacctcgccaatgattacggcgatgcggtaaaaggcagcgataaacctgaccgcattgggccgctacgcggcatgcaaaaaggggtcattacccagcaagagatgaaacgggcgctcattattaccgtcgtgctcatctgtctctccgggctggcactggttgcagtggcatgccatacgctggccgattttgtcggtttcctgattcttggcgggttgtcgatcattgccgctatcacctacaccgtgggcaatcgtccttatggttatatcggtctgggtgatatttccgtactggttttctttggctggttgagtgtcatggggagctggtatttacaggctcatacattgattccggcactgatccttccggcgaccgcatgcggcctgctggcaacggcagtactgaatattaataacctgcgtgatatcaatagcgaccgcgaaaatggcaaaaacacgctggtggtgcgcttaggtgaagtgaacgcgcgtcgttatcatgcctgcctgctgatgggctcgctggtgtgtctggcgctgtttaatctcttttcgctgcatagcctgtggggctggctgttcctgctggcggcaccattactggtgaagcaagcccgttatgtgatgcgggaaatggacccggtggcgatgcgaccaatgctggaacgtactgtcaagggagcgttactgactaacctgctgtttgttttagggatattcctaagccagtgggcagcataactgacaaatatcaattaacaattgatgattttgccaacagcccacatagcgcgatatactgaaaattctcgcagcaactgaatgttaagcctatgaaatacgatacttccgagctttgtgacatctatcaagaagatgttaacgtcgtggaaccgctgttctccaactttggcggacgggcgtcgtttggcggacaaataatcacggtaaaatgtttcgaggacaacgggttgctgtacgatctgctcgaacagaatggccgtggtcgtgttcttgtcgtcgatggcggtggttctgttcgtcgcgcactggtcgatgctgaactggcgcgtctggcagtacaaaatgaatgggaaggtctggtcatttacggcgcggtgcgtcaggtagatgacctggaagagttggatatcggcatccaggcgatggcggcaattccggttggtgccgctggcgaaggcattggcgaaagcgatgtccgcgtcaattttggcggtgtcaccttcttctccggcgaccatctttatgccgacaataccgggattattctttcagaagatccgctggatattgaatgataagaaaggcaccgcaaggtgccttttttctgcgttacctgttggcctacacagtaaagaaattacgcggaagatgaagcgtaatcagacctcttccatgcgacccagcagggcctgcagacgttcctgccagccgttctgctgttctttcagatggttgttctcacgctccagctcttcgcgctgatgctgggcattttgaacttcctgcgacagtgagttgtttttttctttcagctcttcgatttccatctgcaacagagtgatggtatcaatcgcctgctgtacttttgcttccagtttctcaaacacttctaatgacattgtcatacctctcctgaattgcaaggcgttgatggataaaaatcctcgtcccgattaccggtgacgccttaataaatacgagcgcactttagttagctccgattgtatgaagccgcgccatcgctgtccagcggcacgccttgcagattacggtttgccacacttttcatccttctcctggtgacataatccacatcaatcgaaaatgttaataaatttgttgcgcgaatgatctaacaaacatgcatcatgtacaatcagatggaataaatggcgcgataacgctcattttatgacgaggcacacacattttaagttcgatatttctcgtttttgctcgttaacgataagtttacagcatgcctacaagcatcgtggaggtccgtgactttcacgcatacaacaaacattaactcttcaggatccgattatgagtcaaacatcaaccttgaaaggccagtgcattgctgaattcctcggtaccgggttgttgattttcttcggtgtgggttgcgttgcagcactaaaagtcgctggtgcgtcttttggtcagtgggaaatcagtgtcatttggggactgggggtggcaatggccatctacctgaccgcaggggtttccggcgcgcatcttaatcccgctgttaccattgcattgtggctgtttgcctgtttcgacaagcgcaaagttattccttttatcgtttcacaagttgccggcgctttctgtgctgcggctttagtttacgggctttactacaatttatttttcgacttcgagcagactcatcacattgttcgcggcagcgttgaaagtgttgatctggctggcactttctctacttaccctaatcctcatatcaattttgtgcaggctttcgcagttgagatggtgattaccgctattctgatggggctgatcctggcgttaacggacgatggcaacggtgtaccacgcggccctttggctcccttgctgattggtctactgattgcggtcattggcgcatctatgggcccattgacaggttttgccatgaacccagcgcgtgacttcggtccgaaagtctttgcctggctggcgggctggggcaatgtcgcctttaccggcggcagagacattccttacttcctggtgccgcttttcggccctatcgttggcgcgattgtaggtgcatttgcctaccgcaaactgattggtcgccatttgccttgcgatatctgtgttgtggaagaaaaggaaaccacaactccttcagaacaaaaagcttcgctgtaatatgactacgggacaattaaacatgactgaaaaaaaatatatcgttgcgctcgaccagggcaccaccagctcccgcgcggtcgtaatggatcacgatgccaatatcattagcgtgtcgcagcgcgaatttgagcaaatctacccaaaaccaggttgggtagaacacgacccaatggaaatctgggccacccaaagctccacgctggtagaagtgctggcgaaagccgatatcagttccgatcaaattgcagctatcggtattacgaaccagcgtgaaaccactattgtctgggaaaaagaaaccggcaagcctatctataacgccattgtctggcagtgccgtcgtaccgcagaaatctgcgagcatttaaaacgtgacggtttagaagattatatccgcagcaataccggtctggtgattgacccgtacttttctggcaccaaagtgaagtggatcctcgaccatgtggaaggctctcgcgagcgtgcacgtcgtggtgaattgctgtttggtacggttgatacgtggcttatctggaaaatgactcagggccgtgtccatgtgaccgattacaccaacgcctctcgtaccatgttgttcaacatccataccctggactgggacgacaaaatgctggaagtgctggatattccgcgcgagatgctgccagaagtgcgtcgttcttccgaagtatacggtcagactaacattggcggcaaaggcggcacgcgtattccaatctccgggatcgccggtgaccagcaggccgcgctgtttggtcagttgtgcgtgaaagaagggatggcgaagaacacctatggcactggctgctttatgctgatgaacactggcgagaaagcggtgaaatcagaaaacggcctgctgaccaccatcgcctgcggcccgactggcgaagtgaactatgcgttggaaggtgcggtgtttatggcaggcgcatccattcagtggctgcgcgatgaaatgaagttgattaacgacgcctacgattccgaatatttcgccaccaaagtgcaaaacaccaatggtgtgtatgtggttccggcatttaccgggctgggtgcgccgtactgggacccgtatgcgcgcggggcgattttcggtctgactcgtggggtgaacgctaaccacattatacgcgcgacgctggagtctattgcttatcagacgcgtgacgtgctggaagcgatgcaggccgactctggtatccgtctgcacgccctgcgcgtggatggtggcgcagtagcaaacaatttcctgatgcagttccagtccgatattctcggcacccgcgttgagcgcccggaagtgcgcgaagtcaccgcattgggtgcggcctatctcgcaggcctggcggttggcttctggcagaacctcgacgagctgcaagagaaagcggtgattgagcgcgagttccgtccaggcatcgaaaccactgagcgtaattaccgttacgcaggctggaaaaaagcggttaaacgcgcgatggcgtgggaagaacacgacgaataatgtaaatgccgaatgaagcgtttatgccgcatccggtagtcccgaaacgtgcgggggcaaccccgcacacatcaataatccctcccttcccctgtgctacacttcgcgccattccttactgcttagagtttgctatgagacgagaacttgccatcgaattttcccgcgtcaccgaatcagcggcgctggctggctacaaatggttaggacgcggcgataaaaacaccgcggacggcgcggcggtaaacgccatgcgtattatgctcaaccaggtcaacattgacggcaccatcgtcattggtgaaggtgaaatcgacgaagcaccgatgctctacattggtgaaaaagtcggtactggtcgcggcgacgcggtagatattgctgttgatccgattgaaggcacgcgcatgacggcgatgggccaggctaacgcgctggcggtgctggcagtaggcgataaaggctgcttcctcaatgcgccggatatgtatatggagaagctgattgtcgggccgggagccaaaggcaccattgatctgaacctgccgctggcggataacctgcgcaatgtagcggcggcgctcggcaaaccgttgagcgaactgacggtaacgattctggctaaaccacgccacgatgccgttatcgctgaaatgcagcaactcggcgtacgcgtatttgctattccggacggcgacgttgcggcctcaattctcacctgtatgccagacagcgaagttgacgtgctgtacggtattggtggcgcgccggaaggcgtagtttctgcggcggtgatccgcgcattagatggcgacatgaacggtcgtctgctggcgcgtcatgacgtcaaaggcgacaacgaagagaatcgtcgcattggcgagcaggagctggcacgctgcaaagcgatgggcatcgaagccggtaaagtattgcgcctgggcgatatggcgcgcagcgataacgtcatcttctctgccaccggtattaccaaaggcgatctgctggaaggcattagccgcaaaggcaatatcgcgactaccgaaacgctgctgatccgcggcaagtcacgcaccattcgccgcattcagtccatccactatctggatcgcaaagacccggaaatgcaggtgcacatcctctgattgatttgatcgattgagccttccagtccttcgggactggaatttttttgttcggagaacgaagataaggcaagtcaatcaaaacaggagaaaaacatggctgattgggtaacaggcaaagtcactaaagtgcagaactggaccgacgccctgtttagtctcaccgttcacgcccccgtgcttccgtttaccgccgggcaatttaccaagcttggccttgaaatcgacggcgaacgcgtccagcgcgcctactcctatgtaaactcgcccgataatcccgatctggagttttacctggtcaccgtccccgatggcaaattaagcccacgactggcggcactgaaaccaggcgatgaagtgcaggtggttagcgaagcggcaggattctttgtgctcgatgaagtgccgcactgcgaaacgctatggatgctggcaaccggtacagcgattggcccttatttatcgattctgcaactaggtaaagatttagatcgcttcaaaaatctggtcctggtgcacgccgcacgttatgccgccgacttaagctatttgccactgatgcaggaactggaaaaacgctacgaaggaaaactgcgcattcagacggtggtcagtcgggaaacggcagcggggtcgctcaccggacggataccggcattaattgaaagtggggaactggaaagcacgattggcctgccgatgaataaagaaaccagccatgtgatgctgtgcggcaatccacagatggtgcgcgatacacaacagttgctgaaagagacccggcagatgacgaaacatttacgtcgccgaccgggccatatgacagcggagcattactggtaagcggttacttatcgataaacggcacgatgagcaaatccgcactcatcttattgatcatcccgcgatatgccggcatcaaacggttgataaatgagtgatgatgaccacagacaaggaggtcgcactgctctttttgcataatttccagcagtgtttccggcatttctccgcgttcaatacgcagttttgtcttcggccattgaatatttttcgtcagtttatacagcttgttatccgacttattcttcaacaattgaagaatatcttctgttgcagggaagtagatacccggatacaactcgcttaagccatcatcaatatgaattaacgtcaggtgagcgtcattatgtctggcgagctccagggctttattcaccagtaaggcatcttcttcattcccggaaattgccacgccaatgtgtttataagccatgtttaactccttctaaagcaactccatcaagctaacgaacgcagtgataactcaaaaataatcatctcggcctggcatgagaaagtgaaggccgcatcaagctcaacttgcccctccagatccttaatcttataggccacgctggccccttcatctgcagaggatgtagcggcggcaagctctttcagtttggtcataaaagactctgcttcttcgcgggtggcaaaaaagcgcgaaaacttactggtacagttgtcgttatcaatcaccgtaccgatatcaatcgcacatcctttagtactgcatttatctacgacatctttcatagggcacctctgtatattcgcctctctgtcgattacgacttaagaataatgcgccgttaagggaagaacaaacaagtaatgatcttatggattaccattttttttgatattgcttaaggtgaagagttcagaaggattttccgggtattgtcatttgcatcgtggaaataacaatcccggaaaaaaatagcagtaagagatatattaaaggttaattacttgatttattgtcggctttatacttcacatcctgagtatctttaccatatttattttcgccttgtgtgccaacaaacgcaccaagatcgataagcatcatcaccagaatcaacgtcgggacaaaacgccccaccgcccattgccagacacccggtaaaatcgcccagttacccgccagcagcatccacgccacaatcatcagaaatgcccatgcgccggaacgcccgcgatcatgcaagcgcttaacagttactgccgctgttggccagagcaagcacacaaggcaaaacgccgcggtctgaatatcgagtagattcttacccgccagtgagaaaagcaccagcatgcctgcgaaccacaggcctatccaaatccagaaatcacggcgtccaatacgccctttaaatgagaataaccattgctgtatggtcatgtaagttccttgatggttgtcttttccaggattctacccttttgacaagggcgacagatatcgttttaatcggagccagtcataacaaaaggtactgtcaatgaagccagggtgtacgctgttttttctcttatgttctgcattaaccgttacaacagaggcgcatgcacaaacaccagatacggcaacgaccgcgccttatctgctggctggagcccctactttcgatctctccatcagccagtttcgagaagactttaacagccagaatcccagcctgccactgaacgaatttcgtgccatcgacagcagtcccgacaaagccaatctcactcgtgctgcaagtaaaattaatgagaacttgtatgcttctacagcgctggagcgcggtaccttaaaaatcaaaagcattcaaatgacctggctacccatccaggggccagagcaaaaagccgcgaaagcgaaagctcaggaatacatggcagcggtgatccgcacactcaccccattaatgaccaaaacacaaagccagaaaaaactgcagtcgctactaacggcggggaaaaacaaacgttattacaccgagacagaaggtgcactgcgttatgttgtcgcggacaacggcgaaaaggggctgaccttcgctgttgaaccgattaagctggcgctatctgaatcgcttgaaggtttgaataaatgacaaaaagcaaagcctttgtgccgatgaatctctatactgtttcacagacctgctgccctgcggggcggccatcttcctttattcgcttataagcgtggagaattaaaatgcgacatcctttagtgatgggtaactggaaactgaacggcagccgccacatggttcacgagctggtttctaacctgcgtaaagagctggcaggtgttgctggctgtgcggttgcaatcgcaccaccggaaatgtatatcgatatggcgaagcgcgaagctgaaggcagccacatcatgctgggtgcgcaaaacgtggacctgaacctgtccggcgcattcaccggtgaaacctctgctgctatgctgaaagacatcggcgcacagtacatcatcatcggtcactctgaacgtcgtacttaccacaaagaatctgacgaactgatcgcgaaaaaattcgcggtgctgaaagagcagggcctgactccggttctgtgcatcggtgaaaccgaagctgaaaatgaagcgggcaaaactgaagaagtttgcgcacgtcagatcgacgcggtactgaaaactcagggtgctgcggcattcgaaggtgcggttatcgcttacgaacctgtatgggcaatcggtactggcaaatctgcaactccggctcaggcacaggctgttcacaaattcatccgtgaccacatcgctaaagttgacgctaacatcgctgaacaagtgatcattcagtacggcggctctgtaaacgcgtctaacgctgcagaactgtttgctcagccggatatcgacggcgcgctggttggtggtgcttctctgaaagctgacgccttcgcagtaatcgttaaagctgcagaagcggctaaacaggcttaagtctgacaggtgccggatttcatatccggcacttactttccttaactcttcgccttaacgcaaaatctcacactgatgatcctgaatttcctcggctgaagcacggttaagcgtcagtagatttcgttgtgtcgccagcaatacaaatgagttatcactctgccgtaccatcgccagcccgtagcgtcccatatgttcccgcgcctcaggtacttcttctgccagcatcataaatgggctgcgttgtaccagttcgctttccgttacccgacgcgccaggtattcatgcccgcgcaaaccacctggcagtggcaaccagcggctgctgatgttcgccagattgttatccagctgtttgcgcacatcaggacgaatacaagagatatgaatatgaaaatggttttgcgtacgcccggtgcgggagttgatcgccaaagaaaccgcgcgatcgggaaccggctggccgtattttttgctcataaaatcacgcgcctgccaagccaaccaaaagaagttcggcgttgaaggatcggtcaacaaaggactttcagtaccgttaatacgatacgttggcatcaacagatattgcagtgggccattaagatcttttaaaaccacgtatccggcattgggtttgacttccgcacatggcgaaggattttgattttgctgctgattgggcaaacattcctcaaggacaatcttacgtaatgtatccgactcttcaccggttaatttccagtaaccaataccggcagccacaacggcgataactatcatcaccaaaaaaagaagacccgcttttttcatctttttttccctgtacctcaaagagatgcaagggtaacgcaaaatcgtgacaaataaaaaacccggtcgcgagaaaccaccgggtttgataattatcctggggaaatcagcgtttgctgatctgatcgaacgtaccgccgttagcaaaatgctctttttgcgctttcgtccagccgccgaactcttcatcaatggtgaataacttcagctttggaaacgcattttcgtactttttcgccacctcagcgtcgcgcggacggtagtagtttttcgcggcaatttcctgaccttctggcgagtagagatatttcaggtaggcttccgccacctctttagtaccttttttctcgaccactttatcgaccaccgacacggttggctctgcgaggatagactcactcggcgtgacgatttcgaatttatctttccccagttcattcgctgccagcagagcttcgttttcccaggcaatcagtacatcgccaattccgcgctcgacaaaagtgttagtggagccacgcgcgccagaatccagaacttcgacgtttttatacagtgcccgaacaaaatcctgtgcttttgcctgatcgttgttgttgtgatgcagcgcgtagccccaggctgccaggtagttccagcgcgcgccaccagagcttttcggattaggcgtgatcaccgaaacacccggtttaatcagatcgttccagtcatggatctgcttcggatttcccttacgtaccaggaaaacaatggtggaagtgtacggtgcggagttatccggcagacgtttgatccactctttatcaatccgcccgcgttccgcaattgcgtccacgtcataggccagagccagcgtgacaacatcagcttcaataccgttgattaccgacgtcgcttgtttacctgagccaccgtgtgactgacgaatcaccacgttatcaccagtttgctgtttccagtgggcgctgaatgccttgttgtactgttcgtacaattcgcgcgttggatcatatgaaacgttaagaagctgaatatcctttgccataacgctggttgccgccagcaaaaatgttaaccctacgccccacttgttcatcgcccgactctcttatgttgtgttgtgatgagcaaagcgtgccagaaggttaaccaaacattaaagaataaaaaaagattggctataacttgcgggtatatgttgagggattaaaaaggcggaagaaatccgcctcatattgctgacaaagtgcgctttgtccatgccggatgcggcgcgaacgccttatccggcctacaaaagtttgcaaattcaataaattgcagaattcatgtaggcctgataagcgaagcgcatcaggcatttttgcttctgtcatcggtttcagggtaaaggaatctgcctttttccgaaatcattaatacagttttttcgcgcagtccagccagtcacctttgaacggacgcttcatgttttcgatagcgtcgatgatgtcgtggtgaaccagctgttcgttctggatacctacacaacgaccgccgtaacctgccagcagcagatcgatagcgtaagcgcccatacgggaagccagaatacggtcgtaaggcaccggagaaccaccgcgctggatgtggcccagcacagttgcgcgggtttcacgaccggtttctttctcgatgaaatgcgccagttcgtcaacatcacacatatgttcggtaatcgccacgatcgcgtgttttttacctttcgcgatacccgctttgatttcgtttaccaggtcttcacggctgaattcaacttccggaaccacaacgaattcacagccaccggcaatggccgcagccaacgtcagatctccacaataacggcccatcacttccaccacggaaatacgctggtgagaagaagaggtgtcacgcagacggtcgatcgcttctacaacggtgctcagcgcagtgaagaaaccgatagtgtagtcagtgcctttgatgtcgttgtcgatagtgcccggcagaccgatgcacgggaagcccatttcggtcagacgcattgcacccatgtaggaaccgtcaccgccgataaccaccagcgcgtcgataccacgttttttcaggttttcgatagccacggcgcggatgttctcgtcgcggaattccgggaaacgcgcagaaccgaggaacgtaccgccacggttgatcatgtcagacacgctgtaacggtctagctgtaccatacggtcttcatacagacccagatagccgtcataaatacccattacttccagaccttctgtcagcgcagaacgaacaaccccgcgaattgcggcgttcatgcctggcgcatcaccgccgcttgtcaacacaccgattttcttaatcatgactacctctgaactttggaatgcaaaatgaaatctgttgccggaagtcttcttgcacatcgaagtgatccaacgaatgtgcaaatagtataacaatcacttcctgctgaattgattcaggtcaggccaaatggcggtattttatacacaaaatgcgggtctggctctcttttatactgattatgaaagcatagaccgtttaccctccctgggtacgacggaacaggggtcctgatggataattacatccgatcccggaaaacgccgtaaaatagcctgctctacctgatccgccaccatatgtgcctgaaccaaaggcagagagtcttccatttccaaatgaatctgaataaagcgggtcggccctgactgccgcgtgcgaagatcgtgagcgccgctaacacccggccaggaagtcacgatatcaataatttcttgccgttcctcatcaggcaatgcgcgatccagtaatgactgtaccgcctcatatcccatgcgtaacgcgctatataaaatatagatgccgattcccaatgcaaacagagcatcggcgcgatgccagccgtaccaggacaaccccagcgccagcagaattgcgccgttcatcataacatcagactggtaatgtagcatatcagcccgcaccgcctggctttgcgtccgccgcaccacccaacgctgaaacgagacaaggataatcgtacaaattagcgccacaattgtcacgataaccccgacgcctggatctgtcatcggtgttggagatatcagatgttgaatacccgtcaaaaacaggaatagtgccgaaccggagataaacatactttgcgccagcgccgcgagggactcagctttaccgtgaccaaacgagtgattatcgtcggcaggttgcagggaatatcgcaccaccaataaattcgtcaacgacgcgccgatatccaccagcgaatccaccagcgcggcgagaatactcaccgacccggtataccaccatgcaaaaattttaatcagcaatagcagcgaagccatcgccgtcgcagcaatcgccgcccgactgaccagccgtccataagattgattcataaatactcccgctatcaactgacgctagtataacggaagcaaatcatctgcaatgcattaagcagcaggcaaattgaggataaaaaaaacccccacagcatgtgggggaagacagggatggtgtctatggcaaggaaaacagggtttactactgggaacgtgagttgctactactcaatagcttcaacgatgaacttttttgccattgcgtcacgtcacgcaactgctccattcgttgttgatgtttctcgtttaaaaccgcttgctgctccggcgttaacaggcgatacatttggttgcggacttttgccatctcaacctgacgagcaatttgctcattcgccattttttctgcctgtgcgcgcacagcgttttcatcaaaattttctgcggtgacaaggcgatgcattgtctccagttcgctaacattaacaggaggctgttcgtgccgggcctgttgcataagatctcgcatctgctgacgctgatgttcggttaaacttatgccgtcgaacatatggctctgcgtactgcgctgcgtaagttcttcacccggatgccagttatcgcctgaaccgacttcagcagcgtggcttaatgaactgactgccagcgttgaggccatgacggcagcggtaactatgcgcatcatttgctcccaaaatctttctgtcgcgattcaacgatagagagtttacgattcaggctgcaaacatgcgtcagggggtgtaaaacaacgtaaagtcatggattagcgacgtctgatgacgtaatttctgcctcggaggtatttaaacaatgaataaaatcctgttagttgatgatgaccgagagctgacttccctattaaaggagctgctcgagatggaaggcttcaacgtgattgttgcccacgatggggaacaggcgcttgatcttctggacgacagcattgatttacttttgcttgacgtaatgatgccgaagaaaaatggtatcgacacattaaaagcacttcgccagacacaccagacgcctgtcattatgttgacggcgcgcggcagtgaacttgatcgcgttctcggccttgagctgggcgcagatgactatctcccgaaaccgtttaatgatcgtgagctggtggcacgtattcgcgcgatcctgcgccgttcgcactggagcgagcaacagcaaaacaacgacaacggttcaccgacactggaagttgatgccttagtgctgaatccaggccgtcaggaagccagcttcgacgggcaaacgctggagttaaccggtactgagtttaccctgctctatttgctggcacagcatctgggtcaggtggtttcccgtgaacatttaagccaggaagtgttgggcaaacgcctgacgcctttcgaccgcgctattgatatgcacatttccaacctgcgtcgtaaactgccggatcgtaaagatggtcacccgtggtttaaaaccttgcgtggtcgcggctatctgatggtttctgcttcatgataggcagcttaaccgcgcgcatcttcgccatcttctggctgacgctggcgctggtgttgatgttggttttgatgttacccaagctcgattcacgccagatgaccgagcttctggatagcgaacagcgtcaggggctgatgattgagcagcatgtcgaagcggagctggcgaacgatccgcccaacgatttaatgtggtggcggcgtctgttccgggcgattgataagtgggcaccgccaggacagcgtttgttattggtgaccaccgaaggccgcgtgatcggcgctgaacgcagcgaaatgcagatcattcgtaactttattggtcaggccgataacgccgatcatccgcagaagaaaaagtatggccgcgtggaactggtcggtccgttctccgtgcgtgatggcgaagataattaccaactttatctgattcgtccggccagcagttctcaatccgatttcattaacttactgtttgaccgcccgctattactgctgattgtcaccatgttggtcagtacgccgctgctgttgtggttggcctggagtctggcaaaaccggcgcgtaagctgaaaaacgctgccgatgaagttgcccagggaaacttacgccagcacccggaactggaagcggggccacaggaattccttgccgcaggtgccagttttaaccagatggtcaccgcgctggagcgcatgatgacctctcagcagcgtctgctttctgatatctctcacgagctgcgcaccccgctgacgcgtctgcaactgggtacggcgttactgcgccgtcgtagcggtgaaagcaaggaactggagcgtattgaaaccgaagcgcaacgtctggacagcatgatcaacgatctgttggtgatgtcacgtaatcagcaaaaaaacgcgctggttagcgaaaccatcaaagccaaccagttgtggagtgaagtgctggataacgcggcgttcgaagccgagcaaatgggcaagtcgttgacagttaacttcccgcctgggccgtggccgctgtacggcaatccgaacgccctggaaagtgcgctggaaaacattgttcgtaatgctctgcgttattcccatacgaagattgaagtgggctttgcggtagataaagacggtatcaccattacggtggacgacgatggtcctggcgttagcccggaagatcgcgaacagattttccgtccgttctatcgtaccgatgaagcacgcgatcgtgaatctggcggtacaggtttggggctggcgattgttgaaaccgccattcagcagcatcgtggctgggtgaaggcagaagacagcccgctgggcggtttacggctggtgatttggttgccgctgtataagcggagttaaacttcgcatttgcaggcaggataaggcgtttacgccgcatccggcatttgagcaggatgcctgatgcgacgctgatagcgtcttatcaggcctacactccgggggttattttccccacaaccggcgggaaaaatcttcgatcttgccgctcagtcggcgcttttgcatcgtccgcgtccagcttttcgataacccggcagcggagagtaaacggtgatattgatcgtcatcaaacggcatatgccatgcgatggcggcagcctcctgcacggtcacatcgctgacacgggaaaccaactccagcggcgcgtccgcagacactttccctggcgctatcacgctatacaaccaccccaccttacctgtgttttgcatcaactgcgctatatcgctgatatcaaaatggtaattgagtttatagcaaggcgagcgcggctggctgacctgaattaatgcctctccccagcggaaaatatcgcccatataaacattactttccgtcaggccgtcggttgagaggttttcaccaaacgcaggcgcaacaaacaactccgcctgttccggaaattcccgcgcccagtagagataatgctcacgaggataatgacacagcgctctgtctggcccgccgtgaacctttttctccgcctgctcgtcaccttccagccccagctccgtcagcatcaactcaccatcaacctggattttagcaattgcgctgggtttgccttcgggataagcctgaatcttgcctgtgtatacatcaaccggatatcgcatctgttccctctccacgagaaatttccccattagaccatatttattttatgtcaggcgtgctgttttcgcggtaagtatccaggcaggaactcaatagcaaaccggacgaacgttagttcatccggctgtggggattaaggaagcaggtttatttcaccgtacctaaaatttcgattttcgctgctctggctttgactttacgtgaccagatagaggtaagaattggcaccagaatcgaagtcacaatgaccgccgtcgctaccagcgaagttgctgccggagccatcggtttaaacgcaggcaccatttctgcaatcagcacaggtgtcgctaccgcggcccctgcggaactggaagcggcaattccggcagtgccatcgccaccgccaatcaatttatcggcgataatcaacggaataccggtcacgataattactgccacacccaacaggatccccagcaaaccagtctgggcaatcacagtcaaatcaatggtattgcccagcgcgaaggcaaagaatggaatcagcgtttgcaccgctttgctgaaaaattctcgcaattcagggtcaaggttccccagggcaaagcccaccaggaacggtaatactgcgccgacgaaaacatgcggttcaaacgaggcaatcccggcagtgcccagaataatcatcgtcatgagcggcccggactccaacgacatcaacacaaatgccccagcttcttcttttgtgccgtactgctgcatgatggaagcgtaaagtccgccattggtcatatccatcgccgccaccagcgccagcgttgaaagtccggcaaagaatccaacttcaacaccatgttccggaataatacgcgaggcaattgccgcaaccacccacgcgacggcaattttagttaccaccagcgtaccggatttacgcagtaccgttcccgtcgcgcttaattttattgacgcccccatgcaaaaaaaccacaccgccagaatgggcaccgtaccggtaatcatcccgttggtgaatgatccaaaatatttccccgcccccggcgagaaggtgtggcacagtgcgccaaggaatagcgggacgagcatcatcccccccgggattttctcaatcgagcgttttatctgcatttccatcacctgtcggcatatttttaagggctgatgcgtaattcctcaatggagcatcagtgttgatggaaacgaagatagacattcatttaatcaataaaagtgatcaaaaccacatcaattgaaacgctgttttatttttatcggatcattgtttttattttgaaattgatcacaaaaaaaccaccgccgttggcgatggttcattttttaagctgatatgcggcctatacgcctcattgcagcaggcggcaaatgattattttttcgccgcaaaacgtgccgctgcttcgtcccagttcaccacgttccagaactctttaatgtagtccggacggcggttctggaatttcaggtagtaagcatgttcccacacatccaggcccataatcgggaagccggaagcgccagaaatagcttcacccatcagcggagaatcctggttagcagtagaaaccaccgccagtttatcgcctttcagcaccagccatgcccagccggaaccaaagcgggaagctgccgctttttcaaattctgctttgaagttatcaacggagccgaagtcacgttcgatagccgctttcaggtcaccctgcagggtggtgccttttttcagacctttccagaacaggctgtggttagcgtgaccgccagcgttgttgcgcagtacggttttcttgtctgctggcagctggtccagtttggtgatcagctcttcaaccggcaggttggcaaattctggcaggctttccagcgccgcgttggcgttgtttacgtaggtctgatggtgtttggtgtggtggatttccatggtctgcttatcgaagtgcggttccagggcatcgtaagcatacggcagggatggcagggtatagctcatattcatctccagtattgtcgggcggccgattgttaatgccgcgtaagcagttggttcattatagttaattaaatgatattgaaaatgattatcaatgccgtacttttcgtaagggtatggttttgcaggaaaatgcccgagatgtgaagcaaatcacccacttaatgccgtgattgccagtaaatcgacaacggcggcaacaggcgaaaggttaatcgacagcacgatttttacactcatctcgtcggagatgtgacgcgacgaaaaatgatgaggataagaagatgagtaacgcgattacgatggggatattttggcatttgatcggcgcggccagtgcagcctgtttttacgctccgttcaaaaaagtaaaaaaatggtcatgggaaaccatgtggtcagtcggtgggattgtttcgtggattattctgccgtgggccatcagcgccctgttactaccgaatttctgggcgtattacagctcgtttagtctctctacgcgactgcctgtttttctgttcggcgctatgtgggggatcggtaatatcaactacggcctgaccatgcgttatctcggcatgtcgatgggaattggcatcgccattggcattacgttgattgtcggtacgctgatgacgccaattatcaacggcaatttcgatgtgttgattagcaccgaaggcggacgcatgacgttgctcggcgttctggtggcgctgattggcgtagggattgtaactcgcgccgggcagttgaaagagcgcaagatgggcattaaagccgaagagttcaatctgaaaaaagggctggtgctggcggtgatgtgcggcattttctctgccgggatgtcctttgcgatgaacgccgcaaaaccgatgcatgaagccgctgccgcacttggcgtcgatccactgtatgtcgctctgccaagctatgttgtcatcatgggcggcggcgcgatcattaacctcggtttctgttttattcgtctggcaaaagtgaaggatttgtcgctaaaagccgacttctcgctggcaaaatcgctgatcattcacaatgtgttactctcgacactgggcgggttgatgtggtatctgcaattctttttctatgcctggggccacgcccgcattccggcgcagtatgactacatcagttggatgctgcatatgagtttctatgtattgtgcggcggtatcgtcgggctggtgctgaaagagtggaacaatgcaggacgccgtccggtaacggtgttgagcctcggttgtgtggtgattattgtcgccgctaacatcgtcggcatcggcatggcgaattaatctttctgcgaattgagatgacgccactggctgggcgtcatcccggtttcccgggtaaacaccaccgaaaaatagttactatcttcaaagccacattcggtcgaaatatcactgattaacaggcggctatgctggagaagatattgcgcatgacacactctgacctgtcgcagatattgattgatggtcattccagtctgctggcgaaattgctgacgcaaaacgcgctcactgcacgatgcctcatcacaaaatttatccagcgcaaagggacttttcaggctagccgccagccgggtaatcagcttatccagcaacgtttcgctggatgttggcggcaacgaatcactggtgtaacgatggcgattcagcaacatcaccaactgcccgaacagcaactcagccatttcgttagcaaacggcacatgctgactactttcatgctcaagctgaccgataacctgccgcgcctgcgccatccccatgctacctaagcgccagtgtggttgccctgcgctggcgttaaatcccggaatcgccccctgccagtcaagattcagcttcagacgctccgggcaataaataatattctgcaaaaccagatcgttaacggaagcgtaggagtgtttatcgtcagcatgaatgtaaaagagatcgccacgggtaatgcgataagggcgatcgttgagtacatgcaggccattaccgcgccagacaatcaccagctcacaaaaatcatgtgtatgttcagcaaagacatcttgcggataacggtcagccacagcgactgcctgctggtcgctggcaaaaaaatcatctttgagaagttttaactgatgcgccaccgtggctacctcggccagagaacgaagttgattattcgcaatatggcgtacaaatacgttgagaagattcgcgttattgcagaaagccatcccgtccctggcgaatatcacgcggtgaccagttaaactctcggcgaaaaagcgtcgaaaagtggttactgtcgctgaatccacagcgataggcgatgtcagtaacgctggcctcgctgtggcgtagcagatgtcgggctttcatcagtcgcaggcggttcaggtatcgctgaggcgtcagtcccgtttgctgcttaagctgccgatgtagcgtacgcagtgaaagagaaaattgatccgccacggcatcccaattcacctcatcggcaaaatggtcctccagccaggccagaagcaagttgagacgtgatgcgctgttttccaggttctcctgcaaactgcttttacgcagcaagagcagtaattgcataaacaagatctcgcgactggcggtcgagggtaaatcattttccccttcctgctgttccatctgtgcaaccagctgtcgcacctgctgcaatacgctgtggttaacgcgccagtgagacggatactgcccatccagctcttgtggcagcaactgattcagcccggcgagaaactgaaatcgatccggcgagcgatacagcacattggtcagacacagattatcggtatgttcatacagatgccgatcatgatcgcgtacgaaacagaccgtgccaccggtgatggtatagggctgcccattaaacacatgaatacccgtgccatgttcgacaatcacaatttcatgaaaatcatgatgatgttcaggaaaatccgcctgcgggagccggggttctatcgccacggacgcgttaccagacggaaaaaaatccacactatgtaatacggtcatactggcctcctgatgtcgtcaacacggcgaaatagtaatcacgaggtcaggttcttaccttaaattttcgacggaaaaccacgtaaaaaacgtcgatttttcaagatacagcgtgaattttcaggaaatgcggtgagcatcacatcaccacaattcagcaaattgtgaacatcatcacgttcatctttccctggttgccaatggcccattttcctgtcagtaacgagaaggtcgcgaattcaggcgctttttagactggtcgtaatgaaattcagcaggatcacattatgacctttcgcaattgtgtcgccgtcgatctcggcgcatccagtgggcgcgtgatgctggcgcgttacgagcgtgaatgccgcagcctgacgctgcgcgaaatccatcgttttaacaatgggctgcatagtcagaacggctatgtcacctgggatgtggatagccttgaaagtgccattcgccttggattaaacaaggtgtgcgaggaagggattcgtatcgatagcattgggattgatacctggggcgtggactttgtgctgctcgaccaacagggtcagcgtgtgggcctgcccgttgcttatcgcgatagccgcaccaatggcctaatggcgcaggcacaacaacaactcggcaaacgcgatatttatcaacgtagcggcatccagtttctgcccttcaatacgctttatcagttgcgtgcgctgacggagcaacaacctgaacttattccacacattgctcacgctctgctgatgccggattacttcagttatcgcctgaccggcaagatgaactgggaatataccaacgccacgaccacgcaactggtcaatatcaatagcgacgactgggacgagtcgctactggcgtggagcggggccaacaaagcctggtttggtcgcccgacgcatccgggtaatgtcataggtcactggatttgcccgcagggtaatgagattccagtggtcgccgttgccagccatgataccgccagcgcggttatcgcctcgccgttaaacggctcacgtgctgcttatctctcttctggcacctggtcattgatgggcttcgaaagccagacgccatttaccaatgacacggcactggcagccaacatcaccaatgaaggcggggcggaaggtcgctatcgggtgctgaaaaatattatgggcttatggctgcttcagcgagtgcttcaggagcagcaaatcaacgatcttccggcgcttatctccgcgacacaggcacttccggcttgccgcttcattatcaatcccaatgacgatcgctttattaatcctgagacgatgtgcagcgaaattcaggctgcgtgtcgggaaacggcgcaaccgatcccggaaagtgatgctgaactggcgcgctgcattttcgacagtctggcgctgctgtatgccgatgtgttgcatgagctggcgcagctgcgcggtgaagatttctcgcaactgcatattgtcggcggaggctgccagaacacgctgctcaaccagctatgcgccgatgcctgcggtattcgggtgatcgccgggcctgttgaagcctcgacgctcggcaatatcggcatccagttaatgacgctggatgaactcaacaatgtggatgatttccgtcaggtcgtcagcaccaccgcgaatctgaccacctttacccctaatcctgacagtgaaattgcccactatgtggcgcagattcactctacacgacagacaaaggagctttgcgcatgaccactcaactggaacaggcctgggagctagcgaaacagcgtttcgcggcggtggggattgatgtcgaggaggcgctgcgccaacttgatcgtttacccgtttcaatgcactgctggcagggcgatgatgtttccggttttgaaaacccggaaggttcgctgaccggggggattcaggccacaggcaattatccgggcaaagcgcgtaatgccagtgagctacgtgccgatctggaacaggctatgcggctgattccggggccgaaacggcttaatttacatgccatctatctggaatcagatacgccagtctcgcgcgaccagatcaaaccagagcacttcaaaaactgggttgaatgggcgaaagccaatcagctcggtctggattttaacccctcctgcttttcgcatccgctaagcgccgatggctttacgctttcccatgccgacgacagcattcgccagttctggattgatcactgcaaagccagccgtcgcgtttcggcctattttggcgagcaactcggcacaccatcggtgatgaacatctggatcccggatggtatgaaagatatcaccgttgaccgtctcgccccgcgtcagcgtctgctggcagcactggatgaggtgatcagcgagaagctaaaccctgcgcaccatatcgacgccgttgagagcaaattgtttggcattggcgcagagagctacacggttggctccaatgagttttacatggggtatgccaccagccgccagactgcgctgtgcctggacgccgggcacttccacccgactgaagtgatttccgacaagatttccgccgccatgctgtatgtgccgcagttgctgctgcacgtcagccgtccggttcgctgggacagcgatcacgtagtgctgctggatgatgaaacccaggcaattgccagtgagattgtgcgtcacgatctgtttgaccgggtgcatatcggccttgacttcttcgatgcctctatcaaccgcattgccgcgtgggtcattggtacacgcaatatgaaaaaagccctgctgcgtgcgttgctggaacctaccgctgagctgcgcaagctggaagcggcgggcgattacactgcgcgtctggcactgctggaagagcagaaatcgttgccgtggcaggcggtctgggaaatgtattgccaacgtcacgatacgccagcaggtagcgaatggctggagagcgtgcgggcttatgagaaagaaattttgagtcgccgcgggtaaacactgccggatgcggcgcgagcgccttatccggcctacgggtcggcaacagttgtaggcctgataagacgcgacagcgtcgcatcaggcattgattgccggatgcggcacaagtgccttatccggcctacaggtcggcaatagttgtaggcctgataagacgcgacagcgtcgcatcaggcattgattgccggatgcggcacaagtgccttatccggcctacaggtcggcaacagttgtaggcctgataagacgcgacagcgtcgcatcaggcattgattgccggatgcggcacaagtgccttatcaggcctacaggtcggcaatagttgtaggcctgataagacgcgacagcgtcgcatcaggcattgattgccggatgcggcgcgagcgccttatccggcctacgggtcgtgcatccgacaacaccgaatttacaggaacacagaacatgcaaaacattactcagtcctggtttgtccagggaatgatcaaagccaccaccgacgcctggctgaaaggctgggatgagcgcaacggcggcaacctgacgctacgcctggatgacgccgatatcgcaccatatcacgacaatttccaccaacaaccgcgctatatcccgctcagccagcccatgcctttactggcaaatacaccgtttattgtcaccggctcgggcaaattcttccgtaacgtccagcttgatcctgcggctaacttaggcatcgtaaaagtcgacagcgacggcgcgggctaccacattctttgggggttaaccaacgaagccgtccccacttccgaacttccggctcacttcctttcccactgcgagcgcattaaagccaccaacggcaaagatcgggtgatcatgcactgccacgccaccaacctgatcgccctcacctatgtacttgaaaacgacaccgcggtcttcactcgccaactgtgggaaggcagcaccgagtgtctggtggtattcccggatggcgttggcattttgccgtggatggtgcccggcacggacgaaatcggccaggcgaccgcacaagagatgcaaaaacattcgctggtgttgtggcccttccacggcgtcttcggcagcggaccgacgctggatgaaaccttcggtttaatcgacaccgcagaaaaatcagcacaagtattagtgaaggtttattcgatgggcggcatgaaacagaccatcagccgtgaagagttgatagcgctcggcaagcgtttcggcgttacgccactcgccagtgcgctggcgctgtaaggagcaaacatgatccgcaaagcctttgtcatgcaggtaaaccccgacgcccacgaagagtatcagcgtcggcataatcccatctggccagaactggaagcagtgctgaaatctcacggtgcgcataactacgccatctatctcgacaaagcgcgtaatctgctgtttgccatggtagagattgaatctgaagaacgctggaatgcggttgccagcactgatgtttgccaacgttggtggaaatatatgaccgatgttatgcccgctaacccggataacagcccggtgagtagcgagctgcaagaagtgttttacctgccgtaattgcccaatgtgccagagatgcctccggcacaatattttaaatttcgatttgaaaaattaaacatattacatctcccggtaagttatatttccctgatacattgtgagtaaatcacaaaaataatgaataacccattaatgattcatgtggtttatttaaataaccattatgtgcattactccgcaaatctgacctttcactctgtctcaaattgtcattgtttaccgacatatcgcctctcatcacttaatcgctccaccattacaattgattaaaatatattttatggagtccgattaatggcagctcttactgcaagctgtattgacctgaatattcagggcaatggcgcttattccgttctgaagcagttggcgacaatagcgttacaaaacggttttatcaccgactcacaccagttcctgcaaaccctgctgctgcgcgaaaaaatgcactctactggatttggttccggtgtcgccgtgccgcacggtaaaagcgcctgcgttaaacaaccgttcgtattattcgcccgcaaagcgcaggctattgactggaaagccagcgatggcgaagacgtcaattgctggatctgcctcggcgtgccgcaaagcggcgaagaggatcaggtcaaaatcatcggcacactgtgtcgcaaaattattcacaaggaatttattcatcaactgcaacagggcgataccgaccaggtgcttgccttgttaaatcaaaccctcagctcataaggaagtggcgatggagtcatccttacgtattgtcgcgatcaccaactgccccgccgggatcgctcacacctacatggtggcggaagccctggaacagaaagcccgttctctcggtcataccataaaagtggaaactcaagggtccagtggcgttgaaaaccgcttatccagcgaagagattgccgctgccgattacgtcattctcgctaccgggcgtggcctgagcggtgatgatcgcgcgcggtttgccgggaagaaagtttatgagattgccatctcccaggcgttgaaaaatatcgaccagattttcagcgaattaccgacaaactcgcagctttttgccgcagatagcggcgtgaagcttggcaaacaggaagtgcaaagcggtagcgtgatgagccacctgatggcgggcgtctctgcggcgctgccgtttgtcatcggcggtggtatcctggtggcgcttgccaacatgctggtgcagttcggtttgccgtataccgatatgtcgaaaggcgcgccgtcgtttacctgggtagttgaatccatcggttaccttggcttcacctttatgatccccatcatgggcgcttatattgcctcgtcgattgccgataaaccggctttcgctccggcgtttctggtttgctatctggcgaacgacaaagcgctgctcggcacccagtcgggtgcgggattcctcggcgcggtggtgctggggctggcgattggctatttcgtcttctggttccgcaaagtgcgccttggcaaagcattacaaccgctgctcggttcaatgctgatcccgttcgttactctgctggttttcggcgtgctcacttactacgttatcgggccggtgatgtccgacctcatgggcgggctgctccacttcctgaataccattcctccatcaatgaagtttgcggcagcgtttctggtcggtgcgatgctggcgttcgatatgggcggccccatcaataaaaccgcctggttcttctgcttctcactgctggaaaaacacatttatgactggtacgccatcgtcggcgttgtcgcgctgatgccgcccgtcgcggcgggtcttgcgacgttcattgcgcccaaactgtttacccgacaggaaaaagaggctgccagtagtgccattgtggtcggtgccacagtcgcaaccgaaccggctattccttacgctctggcagctccgttgccgatgattaccgccaatacgctggcgggcggcattaccggcgtgctggtgatcgctttcggaatcaaacgtctggcacctggtttgggtatctttgacccgctgatcggcctgatgtcgccggtgggttcgttttatctggtgctggcgattggcctcgcgctgaacatttcattcattatcgtcctgaaaggattgtggttacgccgcaaagcgaaagccgcgcaacaggagcttgtccatgaacattgagttactgcaacagttgtgcgaagccagcgccgtcagcggcgatgaacaggaagttcgcgacattctgataaacacgctggaaccttgcgtgaatgaaatcaccttcgatggtctgggcagctttgttgcccgtaaggggaataaaggtccaaaagttgccgttgtcggacatatggatgaagtcggctttatggtcacccacatcgacgagagcggttttctgcgttttaccaccattggcggctggtggaatcagtcgatgctcaaccaccgggtaaccatacgcacacacaagggagtgaaaatccctggtgtgattggttccgtcgcgcctcatgcgttaacggaaaagcaaaagcaacaaccgctgtcatttgatgagatgttcattgatattggcgcgaacagtcgcgaagaggtggaaaagcgcggcgtggaaattggtaattttattagcccggaagccaattttgcctgctggggcgaagataaagtggtcggcaaggcgttggataaccgcatcggctgcgcaatgatggctgaactattgcagacggtgaataatcccgaaattacgctgtatggcgttggcagtgtggaagaagaagttgggctacgcggggcgcaaacctcggcggaacacattaaaccggacgtcgtgatcgtgttggataccgccgtagcgggcgatgttccgggcattgataacattaaatacccgctgaaactgggccaggggccggggctgatgctgtttgacaagcgctacttccccaaccagaaactggtagcagcgttaaaaagctgtgccgcacataacgatttaccgctgcaattttccaccatgaaaaccggtgcgacggatggcgggcgctacaacgtgatgggcggcgggcgtccggttgtcgcgctgtgtctgccaactcgttatctgcacgccaacagcggtatgatttcaaaagccgattacgaagctctgctcacgctgatacggggttttctgacgaccttaactgcggagaaagtcaacgcgtttagccagttccgtcaggtggattaatgctaaacgaacgccagttaaagattgtcgatctgctggagcaacagccgcgcacgcctggcgagctggcgcaacagactggcgtttcaggcaggaccatcctgcgtgatattgactatctcaacttcacccttaacggcaaagcccgcattttcgccagtggcagtgcgggctatcagctggaaatcttcgagcgccgcagcttttttcagttgctgcaaaagcacgataacgacgatcggctgctggcgctgttattactgaatactttcactccccgtgcgcaactcgcctcggcgcttaatttgccagaaacgtgggtagcagagcgtctgccccggttaaaacagcgttatgaacgcacttgttgcctggccagccgccctggtttgggccatttcattgatgagacagaagagaaacgcgttatcttgctggcgaacttgctgcgcaaagatccgtttttaattccgctggcgggcataacacgagacaaccttcagcatttatccacggcctgcgacaaccaacaccgctggccgctcatgcagggtgattatctctccagcctgattctggcgatttacgccctgcgtaatcaactgaccgatgagtggccgcaatatcccggtgacgagataaaacaaatcgttgaacatagcggtctgtttcttggtgataacgctgtaagaaccctgacgggtttgatagagaaacagcatcagcaagcgcaggtaatttcagccgataatgtgcaggggttgctgcaaagggtgccgggcatcgcgtcattgaatattattgatgcgcagctggttgagaatattaccgggcatttattacgttgccttgccgcaccagtgtggattgctgagcaccgccagagcagcatgaataacctgaaagccgcctggcctgcggcctttgatatgagtctgcactttattacgctactgcgtgaacagctcgatattccccttttcgacagcgatctgatcggtttgtattttgcctgtgcgctggagcggcatcaaaacgaacgccagccgatcattttgctctcggaccagaacgcgattgccactattaatcagctcgccattgagcgcgatgttttaaattgtcgggtaattattgcccgtagcttaagcgaacttgttgccattcgcgaagagattgagccgttattgatcattaacaacagccattatttactggatgacgcggtaaataattacatcaccgtaaaaaatatcattacggctgccggtatcgaacaaataaaacattttctggcgacggcatttattcgccaacagccggagcgttttttctctgcccccggaagttttcattattcgaatgtacgcggtgaaagctggcaacatattacccggcaaatttgtgcgcaattagtcgcacaacaccatattaccgccgatgaagcacaacgcatcatcgcccgcgaaggcgaaggtgaaaacctgattgttaatcgcctcgccatcccacattgctggagcgaacaggagcgacgttttcgtggattttttattaccctcgcccaaccagttgaggtgaataacgaagtcattaaccatgtcttgatcgcctgcgccgccgccgatgcgcgtcatgagctaaaaatatttagctatctggcaagcatattgtgtcagcatccggcggagattattgccgggttaacaggatatgaggcatttatggagttacttcacaaggggtgaactgtgtcggatgcgccgcatccgacactgcatttatcatcaaaaacgtttaacgcaggctattatagtcatcaaccatttcgttgtactcgcgtaatgctctcgggaaagagtcttcgaccatccagcttgagtttgcgtcctgaagttgctctttatcccagtcagagtacgggactttatctctgatgcggcgaacgtattttttagcctcgagttgatactggcctgccgaattaataaacgagaaattcatgccgcctttatccgcttctttggcctgcgccactagcgtttccagttcagacactttcttcattgccgcttctgcatcaaacttatcttgcgatatcaggttattaatttgtttcgctgaaatcatgactgccagagagtagtagtggaatgttttcccttctctttcttcaatatttttcagttccgcaagctgacgcttatcattaatttcctgaatcgccgcatgataagattcggctacaggttcaaaggcttccagattttttaagaatgtctggtgcagcgttttccctttcgcaaacgcatcgtctttataattttcctgggtgtaatatttatccatttcgttaatggtattacccaacgccacggcagcatcgatataactcaccgccacgccatcaattggttgcagcgcaggcgttaacgccacagcactttttacgcctttttcacactcagcgaggttggattcactaatgccgtagatgccataaacagtacgctcttcaccggtaggcccctgtttaaaatctttcagccagtcagcataacgcgccagactgcgctgtaccgggatctgtaacttgttgtagcacttgatatagacatccattttttcgtcgaaaaccgcttgttcatcgaccaccggttgcgcaggtgtttcaggtttagcttctgcttttgcaacgggagcttcagtaggtttcgcttcaggagctggtgcggcaggttgactattggcaggcgggagcgtttctgtttcggcttttttatcatcacaacccgtcagaccgagggacatgatggcgactataatagcggaagataataaattccttttcatttaattgccttataaatatatagataagagagtgaacataataaatgaaaaaagaaaacgccactacacgcattttgtttataaataaaataataaaattcacgaaatgaataagtcctgcaatttaatatatttcgcaggacttattttaattaattgctcaaacgctgcggatgggtataaaccgttgcccgacccggtttacaaaaacctaccagtgtcagattacagcgctcagccacttctacagcaagcgtggtcgcggcagacaccgcaaacaaaatctctacgccgcacatcgccgacttttgcaccatttcataactggcacgactggaaaccagtaccgcaccttgctgccagctttccccttcttgtgaccggcggcctaacagtttgtccagcgccacatggcgacccacgtcttcatgcccgccgaccagttcgccagatggcaacatccaggcagcggcgtgagtacaaccagtcagttgccccactggctgaaaatcgttgagatgacgtaatgcatcatccagtttgttgagatcaaacgtctgggtgaacggtagcggctgcaccggttttccgatgtcattaagttgctccacgccgcatacgccacagcccgtacgtcccgccagcgcccggcggcgctccttcaaccccataaagcggcggctggaaagctcaatttgtacttcaagaccattacaggaaggaacgacatccatgccgaagatatcgcgcggactttcgataatcccctcggaaagcgaaaaaccgagcgcaaagtactcaaggtctttgggcgacgccatcatcaccacatgcgaaatgccgttgtagaccagcgcaacgggaacttcttccgcgacctcatctaaccgtgggtgttgtaaatcatcacgccgccataactcaatttgacgaacacctgtgatatttgtcacattttcgatttcttttcgctgtgtttttttcactttctcttaaccagataagaacacacacaccaacattatggtattctgttacaaacccttcctggatggagggaaattgagccaattctggacctttgcggccccttccgcaaagaaaaataactcccactccctgcacacgcagcaagcgaatgtaaatgggacgtgacaatgtcgaaacaaggagcaatccatgcaggtcagcagaaggcagttctttaagatctgcgctggcggtatggcaggcaccacggcagcggcactgggttttgcacccagcgtagcactcgcggaaacccggcagtataaactgctgcgcacccgcgaaacccgtaatacctgcacctattgttccgtaggctgtgggctgttgatgtacagcctcggtgacggagcaaaaaacgccaaagcatctatcttccatatcgaaggcgatccggatcacccggtcaaccgcggtgcactttgtccgaaaggcgctggcctggtggatttcatccactccgaaagccgtctgaagtttccggaataccgtgcgccaggttctgataaatggcagcaaatcagttgggaagaggcgtttgatcgcatcgccaaactgatgaaagaagaccgcgatgctaactacattgcgcaaaacgccgaaggcgtgactgttaaccgctggctctccaccgggatgctgtgtgcttccgcgtcgagtaacgaaaccggctatttaacgcaaaaattctcccgcgcgctgggtatgctcgcggtcgacaaccaggcgcgtgtctgacacggaccaacggtagcaagtcttgctccaacatttggtcgcggtgcgatgaccaaccactgggtcgacatcaagaacgccaacctcgtcgtggtgatgggcggtaacgccgctgaagctcacccggtcgggttccgctgggcgatggaagccaaaattcacaacggcgcgaagctgattgtgatcgatcctcgctttacgcgtacggcggcggtagctgactactatgcccctattcgttccggtactgacattgctttcctgtcaggcgtattgctgtacctgctgaacaatgaaaaattcaaccgcgaatacaccgaagcctataccaacgccagcctgatcgtgcgtgaggattacggctttgaagatggcctgttcaccggctacgacgcggaaaaacgcaagtacgataaatcctcctggacttatgaactggacgaaaacggcttcgccaaacgcgataccacgctgcaacatccgcgctgcgtgtggaacttgctgaaacagcacgtttcccgctacacgccagatgtggttgaaaacatctgtggtacgccaaaagacgcgttcctgaaagtctgcgaatacatcgcagaaaccagtgctcacgataaaactgcctcgttcctgtatgccctcggctggacgcaacactccgttggtgcgcaaaacattcgtacgatggcgatgatccagctgctgctcggcaatatggggatggcaggcggcggcgttaacgccctgcgcggtcactccaatattcaggggctgacggacctggggctgctgtcgcagagcctgccaggttacatgacgctgccaagcgagaagcagaccgatctgcaaacctaccttaccgccaacacgccaaaaccgctgctggaaggccaggtaaactactggggcaactacccgaaattcttcgtctctatgatgaaggccttctttggtgataaagcgacggcggaaaatagctggggctttgactggttgccgaagtgggataaaggctacgacgtcctgcaatacttcgagatgatgaaagagggcaaggtcaatggctatatctgccagggctttaaccctgttgcctcattcccgaacaaaaacaaagtgatcggttgtctgtcgaaactgaagttcctcgtcaccatcgacccactgaacactgaaacctctaacttctggcagaaccacggtgagctgaacgaagttgactcgtcgaagatccagaccgaagtgttccgtctgccatcgacctgcttcgcggaagagaacggttctatcgttaactcaggtcgctggttacagtggcactggaaaggtgcggacgccccggggattgcgctgactgacggcgagatcctctccggtatcttcctgcgcttgcgcaagatgtatgccgaacagggtggcgcgaacccggaccaggtgctgaacatgacatggaactacgccattccgcatgagccatcttcagaagaagtggcgatggagagcaacggtaaggcgctggccgatattaccgatccggcaaccggtgcggttatcgtcaagaaaggccaacaacttagttcgttcgcccaattgcgcgatgacggtacaacctcctgtggctgctggattttcgccggtagctggacgccggaaggcaaccagatggcacgccgtgataacgccgatccgtctggcctcggtaacacgctgggctgggcatgggcatggccgcttaaccgccgcattctgtataaccgcgcctccgcagatccgcagggtaacccgtgggatccgaagcgtcagttgctgaaatgggacggcactaagtggaccggctgggatattccggactacagcgcagcgcctccgggtagcggcgtcgggccgtttatcatgcagcaggaaggcatggggcgtctgtttgccctcgataagatggcggaaggtccgttcccggaacactacgagccgtttgaaacgccgctgggaactaacccgctgcatccaaacgttatctcgaacccggctgcacgtatctttaaagacgacgccgaagcattgggtaaagccgataagttcccgtatgtcggaaccacctatcgtctgaccgagcacttccactactggaccaaacacgcgctgttgaacgcgattttgcagccagagcagtttgtggaaatcggggagtcgctggcgaataaacttggcattgcccagggcgataccgtgaaagtctcctccaaccgtggctatatcaaagccaaagcggtggtgaccaaacgtattcgcacgctgaaagcgaacggcaaagatatcgataccatcggtattccgattcactggggctatgaaggcgtagctaaaaaaggctttattgccaatactttaacgccattcgttggtgatgcgaacacgcagacgccggagtttaagtccttccttgtgaatgtggaaaaggtgtaacggagacgacatatggcttatcaatctcaagatatcattcgtcgttccgcgactaacggtctgacccccgcgcctcaggcgcgggacttccaggaagaagtggcgaaactcatcgacgttaccacctgtatcggctgtaaagcctgtcaggtggcgtgttcagagtggaacgacattcgcgataccgtcggcaataacattggggtgtacgacaaccccaatgatttaagcgccaaatcgtggacggtaatgcgcttctcggaagtggagcagaacgacaaactggaatggctgatccgcaaagacggctgtatgcactgttccgatccaggctgcctgaaagcgtgcccggcggaaggtgcaattattcagtatgccaacggtatcgtcgacttccagtccgagcagtgcattggctgcggttattgcattgcgggctgtccgttcgacattccgcgcctcaacccggaagacaaccgcgtctacaaatgtacgctgtgcgttgaccgcgtggtggttgggcaagaaccagcctgcgtgaagacctgcccaacgggcgcgattcacttcggtacgaaagagtcgatgaaaacgctggcgagcgagcgcgttgctgagctgaaaacccgcggttacgacaatgcgggtctgtacgatccggcaggcgtcggtggtacacacgtcatgtacgtgctgcaccatgctgacaagccaaatctgtatcatggcttgccggagaacccggaaatcagcgaaaccgtgaaattctggaaaggcatctggaaaccgctcgcggctgttggctttgcggctacctttgcggccagtatcttccactacgtgggtgtcggtccgaaccgtgcggatgaggaagagaataatctgcacgaagagaaagacgaggagcgcaaatgaaacgacgtgacaccatcgtgcgctacaccgcgccggaacgtatcaaccactggatcaccgccttctgcttcatcctggcggcggtgagcgggctgggctttttgttcccgtccttcaactggttgatgcaaatcatgggcacaccgcagctggcgcgaattctgcacccgtttgtcggcgtggttatgtttgcctcgttcatcatcatgtttttccgttactggcatcacaacctaatcaatcgggatgatatcttttgggcgaagaatattcgtaagatcgtcgtcaacgaggaagtaggtgacaccgggcgttataacttcggtcagaaatgcgttttctgggcggcgattattttcctggttctgctgctggtgagcggcgtgattatctggcgtccttattttgcgcctgctttctcaatcccggtgatccgattcgcgttaatgctgcattcatttgccgcagtggcgttaattgtggttatcatggtgcatatctacgccgccctttgggtgaaaggcacgattaccgccatggtggaaggatgggttaccagcgcctgggcgaagaaacatcacccgcgctggtaccgtgaggtccgcaagacaacggaaaagaaagctgaatgagtattcgcataatcccgcaagatgagctgggttcaagcgagaaacgtacggcggatatgattccgccgttattgttccctcggctcaagaatttatacaaccgccgcgccgagcgtctgcgcgagctggcagaaaataatcctctgggtgattacctgcgctttgctgcgcttatcgcccacgcccaggaagtggtgctgtacgaccatccgctggagatggatctgactgcgcgcattaaagaagccagcgcacaaggcaagcccccgctggatattcacgttctgccgcgtgataagcactggcaaaagctgctgatggcgctgattgctgagctgaaacctgaaatgagcggcccggcgctggcagtgattgagaatctggagaaggcatcgactcaggagctggaagatatggccagcgcgctgtttgcctctgatttctcgtccgtcagcagcgataaagcgccgtttatctgggctgcactgtcgctctactgggcgcagatggccaatctgatccccggcaaagcccgcgctgaatacggcgagcaacgtcaatattgcccggtttgtggttctatgccggtgtccagcatggtgcaaattggcaccactcaggggctacgttacctgcactgcaacctgtgtgaaactgaatggcacgtagtgcgcgtaaaatgcagcaactgcgagcagagcggcaaactgcattactggtcgctggatgacgaacaggccgcgattaaagccgaaagctgcgatgactgcgacacttacctgaaaattctctatcaggaaaaagatccaaaaatcgaagccgtagcagatgacctcgcctctctggtactggacgcacgaatggagcaagaaggctatgcccgcagttccatcaacccgttcctgtttccgggtgaaggagagtaatctctgacgttttccgggtggcgcaggtcgcccggattacagctcatagggtgtgacgacaccatctctcgtattccgcgttaccacctcaagctatgccgccagtgccggtttggcctcaatttacccaccaccacatcaataaggttatgggcatgagactgatgacaagcgtaagattgcctgatgcgctgcgcttatcaggcctaccaataaactgcaatacattgaatttatacgactttgtaggccggataaggcgttcacgccgcatccggcatgaacaacgcgcacgttgtcagcaatctgattgacatcattttttcccattaccattcctcgcgcagcttacgctgatattcgacaccatcttcctcacacccttgccagatgccaggaacactggttcttgctgtttgcgattgatttatcaggtattgatctaccgcttcccttaataggtccgcacgaggaagattacgctgcacctcgagatcatcaagttgcttaatcacctcattcgataaatcgagtaaaattctgcccatatctatacctgccagagagttcataaatatctcgccaatatcatttttgaatctatggagagaaaagtacccttgccgaatctttaaagaaagctcatttacgcatcattttttatttttgcgaggcgttttccagatatgatgtaacagttgcagttattataagttcaagtaaaacagccttgtattaataccagaataagggcatctgttttttatattcaagaatgaaaaatttttgtcattccttatgctccttacactgatcatcaacaccaactacctcccccttttgcctgcctccctttgctttacgcaccgggaattgctgacgttccagatattgctctaccgcttcgcgtaaaattgcagatcgtgaaaccttacgccagccccgaagcttgttcagccgtttaattgcctcttctgataaatgaagaaaaaccgtattcatcgccattaccaataccttacatatattactcattaatgtatgtgcgaaaattacgccggaaaatcatttaaaaaaagcggatttttgcatgttgttttgtttttgcgaggcgttttccagaaataataagagtgttgcagttgtttcatttattactcaaaaatggtttagttatcgcccaggatgaattatgggtgctatgaatatattatattcagagatatttatttgcataatctgaatggtgtagccgaaaaacgtcagcatcctaacagcaccaggatttaaggtgaaattaatctttcatcacagaccggtcagtactgccaccaaccggtctttacttgctcatcgttataattttgttggtaacagttcgggaaagttgtttttctaaattaacaacagaataactttcttgtttaatgagattaatattggcaaccattatagcctccttcccacggtttaagagcaaacatacaacataattattcataacatacagagcagtaaatgaatgatactgacaatgatgctagtccattatctttgcataatatttgttagctatagattttaaaaatatttatgagaaaagtatggcaccagagggggttttgactatcaaaaatcgctcaaacatgaactaagatgatgaattaagcattatctgcgataattgccactcagttctacaaataatatttaaatgctcctgaacagtgatgtagcaagacacgtatggagccaacgaagaataaaaatttatagagttcttatttaatataaccgaaatagccaaggactaatataaatgacctgaatgagagaggcagcaccgcccctctccatcagctactcttcttcgttcccgccctcttcatacgggccaaatggcttcgcgggcagaacgatatacgtgccttcaaacactgcacccggcgtctcgtcgccaaagatttcgacctgcatctgcacccgtgcttttcgtccgcgcgccagacggtcgagatcgccgcttaaggcaccgaggtcggctaccgcatgaggtttaccgctaatcggcttgctgtagcggatatgcgcatccgcaagaataatcgttccgccgaggtggcgttcacgcagcatcagccagataagtccccaaccagtgagcgtcgccagtgagaataaactcccggcaaacagcgtatggtgcggattctgattgccggtttctggcatggtagtgataaatttttgcccggtatattgctgaatgcgcacgcccattttttcactaagcgggatatgttcgtaccacgcctgttgcagctgcgcgcaccagtcgccgcgatgcagaatgtcatccagagtggcgacgggcttaatcatcaaaaaatggcgaatcggcgtggtggttggcgtggtgatttctccctgattaacaaaccccagcttggcgaaaaactccaccgcgtcttcacgggcgctacaggtcacgcgcttaacgccttcctgacgcgccaccgactccagggtcatcgccatcagcgtgcctaaccctttgtcctgcacgtcgggatgaacggccataaagcgaatggacgcttcattgtcggcattaatatacagtcggcctaccgccaccagattaccctgctcgtcgacgaccatctggtgatgcgccatcgcatcccacgcgtcgcgttccgaaccttttggttgatgcaggggcttacgcaacatttcccagcgaaactgatagtaacgctctaattcttcttctgtttgtggaacccgaaggtgatacatagcgatactctctcttgtttcccgtgacaaccctggaagctggctcatacctgcaaccagaatgtcacggggccatcattgaccagcgatacctgcatatccgcagcgaagcgtcctgtttgcgtgttcatctcttgctgacggcagcgttcgacgaaatagtcatataacgcctctgcgcgatccggtgatgcacctttggagaaacttgggcgcatcccccgttcggtatctgcggcgagggtaaactgggaaaccaccagcacactgccgcccgcctgttgcacgttgagattcatcttgccttcggcatcgctaaagatgcggtagccgagcacacgctcgcacagacggtttgctttctgttcgtcgtcatccttttcgacacccaataacaccaaaagtcccgcgccaatttcgcccgtcacttctccctccacggtgacgctggcacgggttacgcgttgaattaatgcaatcatggttcgtcgtcttcttcttgttcagctgcttgttttagtttgcggtattccccgagagtgacagtaatttccgcgccaagcaagacgatacaccatgtccagtagacccaaacaaagagaatggggatcaccgccagcacaccataaatgagctgatatgacgggaacatggtgatataaagcgcgaaacctttctttcctgcttcgaacaggagtgcggcgacaaacgcgccgacaatcgcgtcgcggttaggtacgcggatggtaggaacaatgctgtacagcaaccagaaggagatccacgacaacagcaacggaaaaatacgcagcacgttgtcgatgacagtattgagatcgctcgcccagcgcagggagagcaaataggaactgatcgccagactggcccctgccagcagcggccccagcgttaaaatcatccagtacacggcgaacgagtaaatttttggtcgcgctcgtttactgcgccagatggtattcaacgcgctatcgatggagtacatcaacaataacgcggtgacgatcagcccgcacgccccaacggcggtcatcttgttggaattggcaacaaattgttcgatataccgctgaataacatcgccagtagcaggcagaaagttggcaaaaataaagtgacgtaactgaatgctgacgtcggaaaacatgggaaaagcggcgaaaagcgcaaaaacaacggcaaccagcggcactaatgagagcaacgacacataggcaaggttacctgccagggttgtcatgttgtcctcatcaatgcgttgccagagtagttttagccaggcccatagtggacgggtacggtgcctggctttgtcctgaatggtttttagcataacaccttcgcgaaatagtccgggatggtggttttatctttcaccagaatactggtaatgcccagctgattggctccttctatattatcggcgttatcgtcgaaaaagaccgtatcgctgggtgaaaaaccttccgcctgcaaaacatgctggtaaattcgtgcttcaggtttgcgcatccccagatcttgcgacagatagatatggtcagcagcatcacgaatttccgggtattcttccggccagaaggtggtatgcaggcggttggtattggaaagcaccaccacgcgatgcccctgctcacgcagtttatgcatgatggcgatcacttccgggcgcagcgcaacaaacaccgcctgccagccgtgagagaactgctcgtagcttagcggtagagccatctcatgacacagcgcctctgcgaacgcttcgtcgctaatttccccacgctcatgctgatgaaacgcctcccccatatgaaaactcttcttaagcgatgccagcggaatacgcgttaaatcgctccaggctcccagcacacggttaaagtcgatatcgacaatcacattacctaaatcaaagatatagagcatttttgcctcctttcgcgccacaagaaattaactgtagcgggaaaggatgggtttggctatgtggcaaggtatgaagccaggttaacggtcacaaaaatctacgcgtcttcctggggaagaatgatttcaatttggctgtcttgtaagcgtgattttagcgcagcgggcggcagctcgtcggtaaagagcgcagtgacctgtgccacgttaccaatttcaaccgccgccgaagcatgatacttagtgtgatcggcgaccagcagaatatttctcgcgtgcgccatcatcgttttcaccacgttagcttcgtttacatcaaactccatcaacgcgccatcgctctcaatcgccccaacgcttgttaccagataatcagcacgaaaatcagccacaaaggacgccgctgaagggccaatgatcccgctattatgagagcgcaacgtaccgccgggcaccatcacttcaaagcgcgggttgtggtaaagaatatgcgccacacgcaggctgttggtgattatccgcaaatgattatggttaagtaacgcccgggcaacatgctcaacagtcgtaccaatggtgataaatattgttgaaccatcaggaatatagtctgccaccgcttcggcaatcgcttttttttcctcggtttgcgaaacctcacgctgctcgaacgccgtattaacgacgctggaagcccgacccgcgccaccgtgatggcgcgtaatcaggccttgctcgcttaatttacgaatatcccggcggaccgtctgcgtggagacatccagcagatttgccagctcatcaatattcatatacccacgctcggcgatcagcatgaggagttggtcgtgccgcgggttaccggttagttcggtaaggctcatgaaaattcctcgaaaaaccatcaccctggcattttatacaaaaagtgacaaaaaagatcgggtttgatcacagtcagggatcccggctcgtccaccgggacgtgtgcattttaacgccgctacaccgctggcgaagcggactgactccgctaaatccccacttgttgccagcgccaccgccaaagcgccgtgaaaaacatcacccgcacctgtggtatctaccacatcaactttgaaggccggttgatgctgacgcccaccattttccagccagtcgcagcctgcgctaccctgggtcacatagacatgaccatttgtgagcgtttgtgcctgttttagcgcactggccatctctttcacgcccgttaagcgcgccagacccggttctgaaaaggccgcgtgatcgcttaatgccaccagctcactgatatcctgcggcgtaatgtccccgtccagaacggtcatcacacccgcctgacgggccagggtgaaggcttttttagcgccgtcgtgccagcgtacatctgccagcacaacatcccactgagagaaatcaatttcctccaaccactctgcgtcaggcagcagatccgggctggggtagttaatgattatccgctcgcctttggtatccaccatgatggcggattgcgaagatttcgcctggttataccgtttggtgtaacgggtgttaacgccccaggattccagctctgccagcaggctgttgcccgtgtcgtcatcacctacgcgaccaataaaatcgacctgcgcccccagccttgccgccgcaaccgctgccgtcgccgctggcccgccaccaacttccgtataatttctcgccacgtatttaccgctctccgtcggtaacccttccacgtaatagatgcgatccatcacggttatacctacacaagcaacacgaatcatggtcattccttaaacattttgggatgcgttcattttaatttcaccaattgtttaaaaagtgacggctgtcaattttttgacgataaattacaaatacgatcaaaaacagacaagcaaagcatgtcataaatgacaaaaagtgacataactgtattcaggagagggttatggcagcaatcgcgtttatcggtttaggacaaatgggttcgccaatggcgagcaatttattgcagcaagggcatcaacttcgcgtctttgatgtgaacgccgaagctgtgcggcatctggtagacaaaggtgcgactcccgccgccaacccggcgcaggccgctaaagatgccgaatttatcattaccatgttgccgaatggcgatctggtgcgcaacgtgttgttcggtgaaaacggcgtttgcgaaggcttatctaccgatgcgctggtcattgatatgtccaccatccatccgctgcaaaccgataaattgattgccgatatgcaagccaaaggcttcagcatgatggatgttccggtaggccgtacttctgcaaatgccattaccggtactctgttactgctggctggcggcaccgctgaacaagttgaacgtgccacaccgatcctgatggcgatgggcagtgagttgatcaacgctggcggtccgggcatggggatccgcgttaagctcatcaacaactacatgagcatcgcgctcaatgcgctttcggcagaagccgccgttttgtgcgaagccctgaatcttcccttcgatgttgccgtcaaagtgatgagcggtaccgccgccggtaaaggtcacttcaccacttcctggccaaacaaagtcctcagcggagatctttctcccgccttcatgatcgatcttgcccataaggatcttggcatcgcccttgatgtcgccaaccagctgcatgtgccaatgccgctgggggccgcctcacgggaggtttatagccaggcgcgcgcagcgggtcgcggtcgccaggactggtccgccattctggaacaggtccgtgtcagtgccgggatgactgccaaagtaaaaatgtaacgactggataaaggaataaatgaatgaataagtacaccatcaacgacattacgcgcgcatcgggcggttttgccatgctggcggtcgatcagcgcgaagccatgcgcatgatgtttgccgcggctggggcacccgctccggtagccgatagcgttttaactgatttcaaagttaacgctgcaaaggccctctcgccttatgcctcggcgattctggtagatcaacaattctgctaccgccaggtggttgagcaaaacgcgattgccaaaagttgcgccatgattgtcgccgccgatgagttcattcctggcaacggtattccggtcgatagcgtggttattgaccgcaaaatcaatccgctacagatcaaacaagacggtggcaaagccttaaaactgctggtgctgtggcgtagtgatgaagatgcgcagcaacgtctggatatggtgaaagagttcaacgaactgtgccactcacacggtctggtaagcatcattgagccagtcgtccgcccaccgcgtcgtggcgataaattcgatcgcgaacaagcgatcatcgatgccgccaaagagctgggcgacagtggcgctgacctctacaaagttgaaatgccgctttatggcaaaggtccgcaacaagagcttctctgtgcttcacaacgtctgaatgaccatatcaatatgccatgggtgatcctctcttccggtgtcgacgaaaaactgttcccgcgtgccgtacgcgtggcaatgacggcgggcgcatcgggattcctggcaggccgtgcagtctgggcatcggtcgtcggtttaccagacaacgagctgatgctgcgtgacgtttgcgcaccgaaattacaacaacttggcgatatcgtcgacgaaatgatggctaaacgccgctaagatgaggataaaaggaatgaaatggtttaacaccctaagccacaaccgttggctggaacaggaaaccgaccgcatctttgattttggtaaaaattccgtagtgccgactggttttggctggttaggcaataaagggcaaatcaaagaagagatgggcacccatctgtggatcaccgctcgtatgttgcacgtttattccgttgctgcggcgatgggtcgacctggcgcttactcgttggttgatcacggtatcaaagccatgaacggcgcactgcgtgataaaaaatatggcggctggtatgcctgcgtgaatgacgagggcgtggtggatgcctccaaacagggctatcaacacttctttgctctgctgggtgccgccagcgccgtcacaacgggtcacccggaagcgcgcaagctgctcgattacaccattgaaattatcgagaaatatttctggagcgaagaagagcagatgtgcctggaatcctgggacgaagccttcagcaaaaccgaagagtaccgcggcggcaatgccaatatgcacgcggtggaagctttcttgattgtttatgacgtcactcacgacaaaaaatggctggatcgcgcgattcgcgtggcttccgtgattatccacgacgtcgccagaaataatcattatcgcgttaacgaacacttcgatacccagtggaatccgctgccggattacaacaaagataacccggcgcatcgcttccgcgcgttcggaggtacaccaggccactggatcgaatggggccgtttaatgctgcacatccatgctgccctggaagcccgttgcgaacaaccaccagcatggctgctagaagatgccaaaggtctgtttaacgccaccgtgcgcgatgcctgggcacccgatggcgcggacgggattgtttataccgttgactgggaaggaaaaccggtggtccgcgaacgtgtacgttggcctatcgtcgaagcaatgggtacggcctacgcgctctacaccgtcactggcgatcgccagtatgaaacctggtatcaaacatggtgggagtactgcattaagtacctgatggactatgaaaatggttcctggtggcaggagctggatgcggacaataaggtcaccaccaaagtctgggacggcaaacaggatatttatcacctgctgcattgcctggtgatcccgcgtatcccgttagcgcccggcatggctccagcggttgcagcgggtctgctggatattaatgcgaaataactgatctgaaaatagggtgcgggttttcccctctccctaaccctctccccaaaggggcgaggggaccgtccggtgcagtttttgggtttgacatcagcctcacgggaggctgtatgtcgttaattaaggtgccttgtatgcaaatcaccaatatgcattgcagtggacagaccgtttcacttgccgcgggggattatcacgcgaccattgtgaccgtcggtgctggtctggctgaattaacctttcagggttgtcatttagtcatcccgcacaaacccgaagagatgccgctggcgcatctgggtaaagtgcttattccgtggccgaaccggatcgccaacggctgttaccgctatcaggggcaggaatatcagttacccattaatgaacatagttcaaaagccgctattcacgggctgcttgcctggcgagactggcaaattagtgaattaaccgccaccagcgttaccctgacagcttttctgccgcccagttacggctatccgtttatgctggcttcacaagttgtttattcgctcaacgcacacacgggtctttccgttgagatcgcaagccagaatatcggcactgtcgcagcgccttatggcgtgggtattcatccttatttaacctgcaacttaacatctgttgatgaatatctgttccagcttccggcaaaccaggtttatgccgtcgatgagcacgcgaatccgacaacgcttcaccacgttgatgagctggatttaaatttcacgcaggcgaaaaaaatagccgcgacaaaaatcgaccacacctttaaaaccgctaatgatttgtgggaaatgaccattacccatccacagcaggcgctttcggtaagcctttgttccgatcaactctgggtgcaggtttatagcggtgaaaaattacagcgtcagggactggcagttgaacctatgagttgcccgcctaacgcctttaattcaggtatcgacttattattactggaatcaggaaaaccgcaccgcctgttttttaatatttacggacagagaaaataacttgtattgattagcagtcaaaatcattgaagaacatttcactcgctaaaggcaacattatgtatcttcaatttattaagttaaaaacagctcagcttctgtaaagtttttatatatcagttttatgagaatcattttacataagcctgtaataacaggaaggcaacaatctcgttctcaactctatggagattagttatggatacgccacgtccacagttattagattttcaatttcatcagaataacgacagttttaccctacattttcaacaacgtcttattttaacccatagcaaagataatccttgtttatggattggctcaggtatagcggatatcgatatgttccgcggtaatttcagcattaaagataaactacaggagaaaattgcgcttaccgacgccatcgtcagccagtcaccggatggttggttaattcatttcagccgtggttctgacattagcgccacgctgaatatctctgccgacgatcaggggcgtttattgctggaactacaaaacgacaaccttaaccacaaccgtatctggctgcgccttgccgctcaaccagaggaccatatctacggctgcggcgaacagttttcctacttcgatctgcgtggcaaaccgttcccgctatggaccagtgaacaaggcgttggtcgcaacaaacaaacctatgtcacctggcaggccgactgcaaagaaaatgcgggcggcgactattactggactttcttcccacagcctacgtttgtcagcacgcagaagtattactgccatgttgataacagttgctatatgaacttcgactttagtgccccggaataccatgaactggcgctgtgggaagacaaagcaacgctgcgttttgaatgtgctgacacatacatttccctgctggaaaaattaaccgccctgctgggacgccagccagaactgcccgactggatttatgacggagtaacgctcggcattcagggcgggacggaagtgtgccagaagaaactggacaccatgcgtaacgcgggcgtgaaggtcaacggcatctgggcgcaggactggtccggtattcgtatgacctcttttggcaaacgcgtgatgtggaactggaagtggaacagcgaaaactacccgcaactggattcacgcattaagcagtggaatcaggagggcgtgcagttcctggcctatatcaacccgtatgttgccagcgataaagatctctgcgaagaagcggcacaacacggctatctggcaaaagatgcctctggcggtgactatctggtggagtttggcgagttttacggcggcgttgtcgatctcactaatccagaagcctacgcctggttcaaggaagtgatcaaaaagaacatgattgaactcggctgcggcggctggatggctgacttcggcgagtatctgcccaccgacacgtacttgcataacggcgtcagtgccgaaattatgcataacgcctggcctgcgctgtgggcgaagtgtaactacgaagcccttgaagaaacgggcaagctcggcgagatccttttctttatgcgcgccggttctaccggtagccagaaatactccaccatgatgtgggcgggcgaccagaacgtcgactggagtctcgacgatggcctggcgtcggttgtcccggcggcgctgtcgctggcaatgaccggacatggcctgcaccacagcgacattggcggttacaccaccctgtttgagatgaagcgcagcaaagagctgctgctgcgctggtgcgatttcagcgccttcacgccgatgatgcgcacccacgaaggtaaccgtcctggcgacaactggcagtttgacggcgacgcagaaaccatcgcccatttcgcccgtatgaccaccgtcttcaccaccctgaaaccttacctgaaagaggccgtcgcgctgaatgcgaagtccggcctgccggttatgcgcccgctgttcctgcattacgaagacgatgcgcacacttacaccctgaaatatcagtacctgttaggtcgcgacattctggtcgctccggtgcatgaagaaggccgtagcgactggacgctctatctgccggaggataactgggtccacgcctggacgggtgaagcgttccggggcggggaagttaccgttaatgcgcccatcggcaagccgccggtcttttatcgcgccgatagcgaatgggcggcactgttcgcgtcgttaaaaagcatctaatcacatccgcccgtggggaaactcatgggcaaagggagaacatcgatgagtcacatcacaacggaagatccagcaactttacgcctgccctttaaagagaaactctcttacggtattggcgacctggcctctaacatcctgctggatatcggtacgctttatcttttgaagttttataccgacgttctggggctgccaggcacctatggcggcattatctttttgatttcaaaattctttactgcgtttaccgatatgggtaccggcattatgttggattcccgacgcaagatcggtccaaaaggtaagttccgtccttttattctgtatgcgtcattcccggtcaccttactggcgatcgccaactttgtcggcacaccgtttgatgtcaccggtaaaacggtgatggccactattctgtttatgctttacggactgtttttcagcatgatgaactgctcctacggcgcaatggttcccgctatcaccaaaaaccccaacgaacgcgcctcactggcggcatggcgtcagggcggcgctacgctgggcctgctgctgtgcacggtgggattcgtgccagttatgaatcttatcgaaggtaatcagcaacttggctatatcttcgccgccacgctgttttcactgtttggcctgctgtttatgtggatctgctactcgggcgtgaaagagcgttatgtcgaaacccagcctgctaatccggcgcaaaagccgggcctgctgcaatctttccgcgcaattgcgggtaaccgcccgctgttcattctgtgcattgccaacctctgcactttaggggcgtttaacgtcaagctcgccatccaggtctattacacccagtacgtgcttaacgatcccatcctgttgtcgtatatgggatttttcagcatgggctgtattttcatcggcgtattcctgatgcctgcctcagtcagacgttttggcaagaagaaagtttatatcggcggcctgctgatttgggtgctgggcgatctgctcaactatttcttcggcggcggttcggtcagcttcgtggcgttctcctgcctggcgttctttggctcagcgtttgttaacagcctgaactgggcgctggtttccgacaccgtcgagtacggcgagtggcgcaccggcgtgcgttcggaaggaacggtctacaccggttttaccttctttcgcaaagtgtctcaggcgctggctggtttcttccccggctggatgctgacgcaaattggctatgtgccgaacgtcgcacaggctgaccacaccattgaagggttacgccagttgatcttcatctacccaagcgcactggcggtagtcaccattgtggcgatgggttgcttctacagcctgaacgagaagatgtatgtccgcattgtggaagagatagaagcccgtaaacgcacggcgtaataataataaacgacgccctgcggggcgttataaggagtgattatgtctgaccataatccactgacattaaaactgaatctgcgggaaaaaatcgcctatggtatgggcgacgtcggttcgaatttaatgctctgcatcggtactctgtatctcctcaaattttataccgatgaattagggatgcctgcttactatggcgggattatctttctggtggcgaagttttttaccgcgtttaccgatatgctcaccggatttttactcgactcgcggaaaaatattgggcctaaaggcaaatttcgtccctttattttatatgcagcggttccggcggcgttaattgcaacgctccagtttatcgccaccaccttttgtttgccggttaaaacgacgattgccaccgcgctgtttatgatgtttggactttcatacagtctgatgaactgctcgtatggtgcgatgatcccggcaattaccaaaaacccgaatgagcgcgcgcagctcgcggcttaccgccagggtggtgcaaccatagggctattgatttgtaccgtggcgtttattccgttgcagtcgcttttttctgactcaaccgtcggttatgcctgtgcggcacttatgttctccattggcggctttatttttatgatgctgtgctacagaggcgtcaaagagcattatgtggacacaacgccaaccggacataaagccagtattctcaaatcattttgcgcgatatttcggaatccgccattgctggttttatgcattgctaacttgtgtaccctggcggcatttaatatcaaactggcgattcaggtctattacacccagtatgtgctgaatgatattaatttattgtcgtggatgggattcttcagtatgggatgcatcctcatcggcgtattactggtgccattaactgtaaaatgttttggtaaaaaacaggtttatctggctggcatggtgctgtgggcggtgggtgatatactgaattatttctggggaagtaactctttcactttcgtcatgttctcttgtgtcgccttttttggcacggcctttgtaaacagcctgaactgggcactggtaccagataccgtagattacggtgaatggaaaaccggtattcgtgccgaaggttctgtttataccggttataccttctttcgtaaaatttctgccgcacttgctggcttcttgccaggcattatgctgacgcaaattggttatgttcccaacatcgcgcaaagcgatgcgacattacagggtttgcgtcagctcatttttatctggccttgtgcactggcaattattgctgcattgacgatgggattcttttacacactcaatgaaaaacggtttgcattgattattgaggaaatcaaccaacgcaaaaataaagagatggcgacagaagaaaaaacggcttccgtaacgttataaatgtcaatagccgctatttccatcctggtgggtggcggcctccctacgtttaaaaaatggacttattatgaaaaagattaatgcaataattttattatcttctctgacctctgcctcggtatttgctggcgcatacgtcgaaaacagggaggcatataatcttgcctccgatcagggcgaggttatgctacgtgtgggttataacttcgatatgggcgcgggtattatgttaaccaatacctacaactttcagcgagaagatgaactaaaacatggatataacgaaattgaaggctggtatccgttatttaaaccaaccgataaattaaccatccagcccggtggcttaattaatgataagagtatcggttcgggtggtgcagtgtatctggacgtcaactataaatttgtaccatggtttaatctgacagtacgaaatcgctataaccataataactatagttcaacagatttgagcggggaactggataataatgacacctatgaaattggcacctactggaattttaaaatcaccgataaattttcctatacatttgagccacattacttcatgcgagtgaatgactttaatagtagcaacgggaaagatcatcattgggaaatcactaacaccttccgttaccgtattaatgaacactggctcccttatttcgaattgcgctggttagaccgcaacgtcgaaccgtaccaccgcgagcaaaaccagatccgtatcgggacgaagtatttcttctgatgtgaaactgccggatgcggcgtaaacgccttatccggcctacggttgatacggttttcgttggccggattaagcacatccggccattaattaagcttcagccgccagcatctctttcttacgttggctaatacgcttaaccagcattacggaaaccaccgcaccactgaatgcgaagcaggccataatgccaaacacgattttgtagccaataatccccggatttaaatccagaatgtagccatacagactgaagcagaacatcgccggagcgtaaccaataaagctacccaacgccatcgccgcacctgttttattttcagcaatttttgcttcgccgataggtgcaaaaaatacggctcgctgtgtaaagactatcgcgccaaagcccagcgtacatgccatccctaaatagaccggcatactttcgtgcggcagcataatcaacagtacgagcgcagcggtactaatgataaaggtgtagcatagatatttacttggcgatttcaggatcttatctgaaatcatgccaccaatcggtccaccaatcattttcagacagtattggttaatgatgccgtaagcccccaccagcgcaacgggcaatagatagatgtttttcaggaatggaatgaagaatgtcaggccacagtaaaccgcgtaaacgaagaagacgttaaaagcgataagccagatagttttgtctttcagcaccgaggtcatactggtgtttttcgatgctccgtcttcttttttcacctcaacggacggtgcctcttctttgtcattcaggacaaagaaaataataatgcctacggcaatcacaataagggaatagaaccagatgcctgctttaaaacctaataagccactgccaaaccaggtaaatactgccaacgcagaaaatgccaccacggtatcgacaatgccacgccctgtttcgaagaagccaaacaaccgaccttgttgttcgctattgcccaatcgacttaccgacttgagcaagaccggccagttcatcatgtcgcaagtaacgccaaatagcgcccagacaaagaggatgccccaataccccggcattgtcgtcaaataaacacccagtaatcctgtcgcaatgagtgagaatgacatggtgtatctgcgcggtagtttatcggcaaaataaatagacagaaaaaagcccactgtggtgacaaatgagtttaccgacatagcattaccaatttgaccattggtcaaatggaaatattcctgcatcgggatataaaacgcatctttcagcgacggtaatttataaattgtaccgccacacagtgttaatagactaaataacgcccatttctttttcgtgagcataacatcccctaagcgatttttaaaatcactgttttaaaggcaataagataccgaccattcatatggaatggttttattaactgcgtatgagttaaaacttattagtggttcagaagatggtttgcctcttgtttgatttgttgtagtacgttacgcacatgatttatctgattaattgcatcttctttttctttacgtaaccgcgcatccagtaaatgattttctggcaatggtgtttcactcatctggcgataagggatccacggattatcatcttcgtcttcaaagcggaacgccggcgcatagtaatcaacctcttcttccaggccatatgccgtcacctgcggctcatcatcacccaggcagataaggtgcgttaataacgctttgaacggcatatcaccctgacctgaaatacaggctttatgacccaggccacccggttctttaacgatcaaggcatctttgatatggacctgggtaatatgcggtgccatcgtttttaaagcgtcgatgggatgctcatttgcattgatcatgttcgcaaaatcaaacagtaaggaaagagattccatctcactttctttgaccagcgacaccagctcatgactttttaaatcttcatgctgctcgatcgtaaaagtcaggccgctgtcctgatacgtttcccgtacataggcaatgtcgttagcgataatcgataatacgtcgcgcaaattaccttcataacgtggataaaaacgtacggacgatgccccagttttcaacgcgatggcgacggcttcgtcaatagatgccttatctgaggcgctggtttcaatatgaatatcaaggttcagacggcgggctttatccccaaaggcagagagttctttatcgtccatattaccaagagaaaaacgctcgccatcgagaacatggattttgacgccacgtagattattttcacttgcgatatcaagtaaatcagcaggcaacactctttccagccgcatatttaaatgaaaggcataagcatgtaaataaagaggaagagtgtcgacacgttgtagaatctttcttgcgttatttattgtcaccataaaacacctacagattaatgatgaggtctacggcctcaaatcgccaatattcaatatctatttggacaatattgccttgctggtcggcgcgatgcttttcaattaagatcgctggcatacccgcagaaccgccaagatacttgctgatatcgcccggcattctgacgggtttgaaaatcaatttttttactaccgtctctttttggtagcacttttcccagactgcagaaaatgagtggttttcaagttgttcaataaagcccggagcaacttcaggattaatatatgtttcgtgatagaaaactttatgtccttccagcgccccccagccggtgatgcgatagagttcagttgatggcgtcactgcaatcagtggcgcgagcgtctcgggaatatcgctggtacggtttttctcggtaaacccccaggaaggctctcgcccttgctcaattgcggcccgctgaaagctcgccgacagctccggactgtaattaaatcgcggctgggtcacgaaccaccccttacgatccttacggaagattttggattctgcctcgaggttcaacaacgcctggcgcagcgtcatacgtttaatgcccagcagttctcccagctctctttctgaagggagttttccacccggcgtggtgatgccatctttcaaccaccgatccagtttctcttttgcattttctacggtggattgattctccgccattgtttaatccttttggtttaaaccagatgaagcatcttacgcttacgccaaaaaagaaagcaattaacggcgtatgactttgcagataattgtgacaaagctctctattgacgtaaccacagacttataagggagatactcgcattggtgtgcgctcacgacaggcaaaaaaaaacctgccatcgctggcaggttttttatgactaaaaaacgaaattaatcgtctttcggtgcgcggttggcgcggcgacgatcgttttccgtcaggtgacgtttacgaatacggatagaggtcggagtcacttctaccagttcgtcatcatcgatgaactccagagcttgttccagagtcatgcggataggcggaaccagaacaacggcttcgtcagtaccggaagcacgcatgttggtcagtttcttaccggtcaggcagtttacagtcaggtcgttagagcggctatgaataccgataatctgaccttcgtaaacttctgcaccgtgaccgaggaacagcttaccgcgatcctgcagaccgaacagcgcgaacgcgaccgctttaccctgaccgttagagatcagtacgccgttctgacgctgacccacttcacccggacgtacgtcgtcgtagtggctgaaggtggagtacagcagaccagtaccggaagtcatggtcatgaactcagaacggaagccaatcagaccacggcttgggatcacgtagtcgagacgtacgcggcctttaccgtctggattcatgtttttcaggtcgcctttacgttcgcccagcgcctgcattacagaaccctgatgctgttcttcaacgtccagagtcacgttttcatacggctcttgtttacgaccgtcgatttcacggaagataactttcggacgggataccgccagttcgaaaccttcacgacgcatgttttcgatcagaacagacaggtgcagttcgccacgaccagaaacgcggaacgcatcggcgtcttcggtttcttctacgcgcagcgcaacgttgtgtaccagttctttgttcagacgatccaggatctgacgagacgttacgaacttaccttctttaccgcagaacggcgaggtgttaacgcagaagaacatagaaacggtcggctcatcaacggagagtgccggcagcgcttcaacgttttgcgtgtcgcaaacggtgtcagaaatgttcagttcgccaaggcccgtgatcgcaacgatatcgccagcttccgccagatcggtttcgatacgttccagaccgaggtggcccagcactttaccgactttcgcgttgcgggttttgccttcgctatcgatgatagtgacctgctggttcggcttcactttaccgcgcttgatgcggccaatgccgataacgccaacatagctgttgtaatcgagctgagaaatctgcatctggaacggaccgtcaaggtcaacgtccggcgcaggaacgtggtcaacaatcgcctggtacagcggggtcatgtcttccgccatatcttcgtggtccagacccgcgataccgttcagcgcagaagcgtaaacgatcgggaagtccagctgctcgtcggtcgcgtcgaggttaacgaacagatcgaatacctgatccacaacccaatcaggacgcgcgccagggcggtcaactttgttgataacaacaatcggcttcaggccgtaagcaaacgcttttttggttacgaagcgcgtttgcggcatcgggccgtcaaatgcgtcaaccaccagcagcactgagtctaccatggacattacacgttcaacttcaccaccgaagtcggcgtgccccggggtatcaacgatgttgatacggtaatcattccatttgatagcggtgtttttcgcgaggatggtaatcccacgctctttctccaaatcgttggagtccatcacgcgctcttgggtttcggcacgagagtcgaacgtaccggattgttggagcagcttgtctaccagggtggttttaccatggtctacgtgcgcgatgatggcgatattacgcaatttttcgatcacaactttgcctcaggcattagaaatagcgcgttattgtacacggattaatcgcactacaaaacaggatcacaaacatcctccgcaaacaagtattgcagagtccctttgtgatcgctttcacggagcataaaaagggttatccaaaggtcattgcaccaacatggtgcttaatgtttccattgaagcactatattggtgcaacattcacatcgtggtgcagcccttttgcacgatggtgcgcatgataacgccttttaggggcaatttaaaagttggcacagatttcgctttatcttttttacggcgacacggccaaaataattgcagatttcgttaccacgacgaccatgaccaatccaggagagttaaagtatgtccgctgaacacgtactgacgatgctgaacgagcacgaagtgaagtttgttgatttgcgcttcaccgatactaaaggtaaagaacagcacgtcactatccctgctcatcaggtgaatgctgaattcttcgaagaaggcaaaatgtttgacggctcctcgattggcggctggaaaggcattaacgagtccgacatggtgctgatgccagacgcatccaccgcagtgattgacccgttcttcgccgactccaccctgattatccgttgcgacatccttgaacctggcaccctgcaaggctatgaccgtgacccgcgctccattgcgaagcgcgccgaagattacctgcgttccactggcattgccgacaccgtactgttcgggccagaacctgaattcttcctgttcgatgacatccgtttcggatcatctatctccggttcccacgttgctatcgacgatatcgaaggcgcatggaactcctccacccaatacgaaggtggtaacaaaggtcaccgtccggcagtgaaaggcggttacttcccggttccaccggtagactcggctcaggatattcgttctgaaatgtgtctggtgatggaacagatgggtctggtggttgaagcccatcaccacgaagtagcgactgctggtcagaacgaagtggctacccgcttcaataccatgaccaaaaaagctgacgaaattcagatctacaaatatgttgtgcacaacgtagcgcaccgcttcggtaaaaccgcgacctttatgccaaaaccgatgttcggtgataacggctccggtatgcactgccacatgtctctgtctaaaaacggcgttaacctgttcgcaggcgacaaatacgcaggtctgtctgagcaggcgctgtactacattggcggcgtaatcaaacacgctaaagcgattaacgccctggcaaacccgaccaccaactcttataagcgtctggtcccgggctatgaagcaccggtaatgctggcttactctgcgcgtaaccgttctgcgtctatccgtattccggtggtttcttctccgaaagcacgtcgtatcgaagtacgtttcccggatccggcagctaacccgtacctgtgctttgctgccctgctgatggccggtcttgatggtatcaagaacaagatccatccgggcgaagccatggacaaaaacctgtatgacctgccgccagaagaagcgaaagagatcccacaggttgcaggctctctggaagaagcactgaacgaactggatctggaccgcgagttcctgaaagccggtggcgtgttcactgacgaagcaattgatgcgtacatcgctctgcgtcgcgaagaagatgaccgcgtgcgtatgactccgcatccggtagagtttgagctgtactacagcgtctaagtgttttagttgccgtggaaacttttcgcctgtctctggcaggcctgggatcggtggcaagcacatcacgccggatgcgacgcaaatgcgtcttatccggcctacacggtgatgatgtggtaggccggagcaggtgagtcgctctccaacgtgaagtttgtcagctatctgtagcccatctctgcatgggcttttttctccgtcaattctctgatgcttcgcgctttttatccgtaaaaagctataatgcactaaaatggtgcaacctgttcaggagactgctttatggcaacaggcacgcagcccgatgctgggcagatcctcaactcgctgattaacagtattttgttaatcgatgacaacctggcgatccattacgccaaccctgccgcgcaacaactgctcgcccaaagctcccgcaaattgtttggtacaccgttaccggaactgttgagctacttctcattaaatatcgagctgatgcaagaaagtctggaggcggggcaaggttttaccgataacgaagtgacgctggtcatcgacgggcgctcgcatatcctttctgtgacggcccagcgtatgccggacggcatgatcctgctggagatggctccgatggataaccagcgccgcttaagtcaggaacagctacagcacgcccagcaggttgctgcccgtgatttagtgcgcggcctggcacatgagattaaaaatccgcttggcggtttacgtggcgcggcgcagctgctcagcaaagcgttacctgacccatcactactcgaatataccaaagtgattatcgaacaggcggaccggctgcgaaatctggtcgaccgtctgttggggccgcagctgcccggtacgcgcgttaccgaaagtattcacaaagtggctgaacgcgtggtaacgctggtgtcgatggaactgccggacaacgtgcggttgattcgtgattacgatcccagcctaccggaactggcgcacgacccggatcaaattgaacaggtcttgctgaatattgtgcgcaatgcgctacaggcgctggggccggaaggcggtgaaatcattctgcgtacccgcaccgcgtttcaactgaccttacacggcgagcgctaccggctggcggcgcggattgatgtggaagataacgggccgggcattccgcctcatttgcaggatacgctgttttacccgatggtcagcggccgcgaaggtggcaccgggcttggcttatccatcgctcgtaatttgattgatcagcattcaggcaaaattgaatttaccagttggccagggcataccgagttctcggtttacctgcctatcaggaaataaaggtgacgtttatgcaacgagggatagtctgggtagtcgatgacgatagttccatccgttgggtgcttgaacgtgcgctcgctggggcaggtttaacctgtacgacgtttgagaacggcgcagaagtgctggaggcgctggcgagcaaaacgccggatgtgctgctttcagatatccgtatgccgggaatggacgggctggcgctgctcaagcagattaaacagcgccatccaatgcttccggtcatcattatgaccgcacattccgatctggatgctgccgtcagcgcctatcaacaaggggcgtttgattatctgcccaaaccgtttgatatcgacgaagcagtggcgctggttgagcgcgctatcagtcattaccaggaacagcagcagccgcgtaatgttcagcttaacggcccaacgaccgatatcatcggcgaagcgccagccatgcaggacgtgttccgtattatcggtcggctttcgcgttcttctattagcgtgctgattaacggcgaatccggcaccggtaaagaactggtcgctcatgccctgcatcgccacagtccgcgcgccaaagcgccgtttatcgcgctgaatatggcagctatcccaaaagatttgatcgaatcagaactgtttggccacgagaaaggcgcgtttactggcgcgaataccattcgtcaggggcgttttgaacaggccgatggcggtacattattcctcgacgaaattggtgatatgccgctggatgtgcagacgcgtttgctgcgcgtgctggcagacggtcagttttaccgcgttggcggctatgcgccggtgaaagtggatgtgcggattatcgctgccactcaccagaatctcgaacagcgagtgcaggaaggtaagttccgtgaggatctgttccaccgcctgaacgttatccgcgttcatctgccgccgctgcgcgaacgtcgggaagatattccccgtctggcgcgccattttttacaggttgccgcgcgcgaactgggcgtagaagcgaagttactgcatccggaaaccgaagctgctctgacgcgtctggcgtggccaggcaacgtgcgccagctggaaaacacctgccgctggctaacggtgatggccgccgggcaggaagtgttgattcaggatttgcccggcgaactgtttgaatcaacggttgcggagagtacttcgcaaatgcaaccggacagctgggcgacgcttcttgcgcagtgggcagacagagcgctgcgttccggtcatcaaaatctgctttccgaagcgcagccagagctggagcggacgttactgacgaccgcgttgcgacatacgcaggggcataaacaggaagcggcgcggctactcggctggggccgcaacaccctgacgcgtaagttaaaagagctggggatggagtgattcacagcttgtgtgtaaagattgattattgagcgcaaattgctggtattttacgctttactgttccgataagttcagtatgatcttgcccggaaaacggggagagtcattatgctggaatcaataattaatctggtatcgagtggcgcagttgacagccacacaccgcaaactgccgttgctgccgtgctgtgtgccgcaatgattgggctgtttagctgaagctcgttgtttatgccggatgcggagaaagtcgtaggcctgataagacgcgaccagcgccgcatcaggcatcatgctcagatgcctgatgcggcgtaaacgccttatccggcctacaaaagcaataatttcaacaggttttgttgcccagcgcatcaggcaatcttgttctcagcacattgatggcgctttcgttttctactttgtaaacgaagcgccattcactatttaaatcacccgagagaactgctgcatccgcgctttctggcgcagataggtatcaaagcacatgcaaatgttgcggatcagcaagcgacctttcgccgtcacctgtattcccttctcatccacatccaccagcccatcttttgctaacggggcgagcagcttgagatcttccgcaaagtaatcagcgaagtgcaaatcccactgtttctcaataggggcgtaatccagacggaagttgcagatgagcgacttaatcacatcgcggcgaatacagtcatcacgcgttagcgcaataccacgccacagcgcattgccttgttcatccacttgctgatagtactgcttcaactctttctggttctgcgcgtagcagtcgccaatcatgctgatggcggaaacgcccatccccagcagatcggtatcgccctgagtggtgtagccctggaagttacgatgcagcacgccttcacgctgggccaccgccagctcgtcatccggacgggcaaagtgatccataccgataaactgatagcccgattgcgtcaggaaggcgatggtttcctgcaggatatcgagtttttgctgcggactcggcaggtcagcatctttgattttgcgctgagcagcaaaaatggtcggcagatgcgcgtagttaaagacactcagacgatcggggttcagctccgccacacgtttcagggtaaaggcgaaactctccggcgtctgtttcggcaggccgtaaatcaggtcgatgttggtggaggtaaaaccaatctcacgcgcatggttaagcagtgcaaagatgaactcttcatcctgctcgcggttaaccagacgttgcacttctttgttgaagtcctgcacgcccatgctcaggcgattaaagccttcggcgcgtaaatgatcgagtacatccagttcgatttcccgcggatcgacttcgatcgaaatctccgcatcggcattgaactggaagttttcgcgcagcagcttcatcaggcggctgatttgcgctttattcagatacgtcggcgttccgccgccccagtgcaattggctgacgtgacgcccggcgaacagcggtgcacgatggacgatttcttgctccagcgcgtccagatactgatcggccttgtgctgctggcgagtaacaatcttattgcaaccgcagaagtaacaaagcttatggcagaacgggatatgtacgtagagagataatggacgctcaggatagcgcgccacggcttgtaaaaacgcctgttcgccgaagtcttctgaaaactccagcgcggtcgggtacgaggtgtatcgtggcccggaatagttatatttctggatcagggccagatcccagtcgatttgctgtacagacatgctcactccttccgatggcgtctctggcggctacggcgtaccggcggatgcccgtttcgggtcatcagccggttgcgcagccacttttgtcgccgcgacaaccgctgtagtttaacgaataaccacaccagataacatataaccggaagggttatcagcagaacgggaaggcccacggcggcaatccgttagttgccccgcagcagacgcatcatgtcttcttgcttctcgtcttcttcctcttcttcgtcatcgtcataagagaggccgagtttctgcatcaactcatcaatacgatccagtttagcatccacccaggattgctcttcggcactcagggtttcgcctgcttccagacgttccagcagcgcatccagacgctcatccgtttccagtaattccaactccgcctgcggtgaaagcataggtttctcactcttcggtttgtgctgtttggtgactttttcagtcacgcccaatggaataggggttttactgccaatacgtggatcttttggtgcgttctggcctttgctgcctgacgtggtgtttccgcccgctgcgcggctgcccggcgcatgaccacgacgttttttctgacgcttgcgatcacgagcttcctgatccagctcctcgcgtgtttttcgacgcgcttttgcatgacctttgctgcgtgagtttgaagatgatggtttcataatggttcgtcttttagccgttttattcagtatagatttgcggcggaatctaacagaaagcaagcaaagaaaaaaggcgacagattactctgtcgccttttttcctgactcataacccttaacgggtcttacaatccttgcaggccgccaacacaccctgtttttcctttagccggaacaatccgtgttgattccatttccgtttaattacgtctccggacgtttgtcttcctgacaatcctctgtcttcgcctcctggcgctcctgaccctcatcctgagtcattgttcctgttagcgtcctcgctctatgggtgctactttacgcctttgctttaaacaaacaatcaaccgccatcagtatttgcacattttcagagttttatataaaagcaattcactgatttatatagcttatttgacatgcatcgcagaattttctctgctatttcgcataaagactatcggcaatgtctcacaaagcgtatggcttttacttacaacgctcacgccgaaaaatccgccttttattatggttcaggtataatcgccacaaagctttgactgacggagacgaccgctttgactaatttgaattatcaacagacgcattttgtgatgagtgcgcctgatattcgccacctaccttccgataccggaattgaagtggcttttgcaggccgttccaacgcaggtaaatccagcgcgctgaacacgctgactaaccagaaaagcctggctcgtacctcaaaaaccccagggcgcacccagcttatcaacctgtttgaagtggctgacggcaagcgtctggttgacttgcctgggtacggttatgcggaagtcccggaagagatgaagcgcaaatggcagcgtgcgctcggcgaatacctcgaaaaacgtcagagcctgcaaggtctggtggtgctaatggatattcgccatccgctgaaagatttggatcagcagatgattgagtgggcggtagacagcaatatcgccgttctggtgctgctgaccaaagcggacaaactggcaagcggcgcacgtaaagcgcaattgaatatggtgcgtgaagctgtactggcgtttaacggtgatgtgcaggttgaaacgttttcttcgttgaagaaacaaggcgtggacaagctgcggcagaaactggatacctggtttagcgagatgcagcctgtagaagaaacgcaggacggcgaataattttcttgccttaatgcttgtgccggatgtggcgtatccggcccgtaaattcaatagattacaattctaccgttggcctgataaacatagcgcatcaggcattacggatcttttctttcgcccaataaaaaacgccccagtcattactgactggggcggctaaaatattcagccaaatccgattacgtgaagtaaaaggtctgaaagatagaacatcttacctctgtaccctacgcgactaactttactcttttttgttcagttcagaaagcactttttgtaattttttttcagttgttgcataggaatttctaatagccatcacaaaacgtgacagcttatgttgcttacttacgaaaaaaggcatgttcaggcgaatcttagtgcgcctgatcccagttttcgccactccccacttccaccagcaacggcacatccagacgggtacagttttccatcagttgatgaatctgcttcgcgacggcatcaacatcatctttatgaacttcaaataccagttcatcgtgtacctgcatgatcatacgtacacgcggttgctcagcctgtaaccacgcatcaacggcaatcatcgcccgtttgataatgtcggcggcggttccctgcattggcgcgttaatggctgcacgttcagccgctgcacgacgagcaccattgctggatttgatatccggcagatacagacggcgtccgtccagcgtttcaacgtagccctgctctttcgcctgagcacgggtgcgttccatatactccagcacgccagggtagcgttcgaagtaaaggtccatgtacttctgcgcttctttacgtggaatgttcaattgccgcgccagaccgaaagcactcatgccataaatcagaccaaagttgatcgctttcgcgctacggcgttgctcgctggtgacggtttccagtggcaaaccaaacacttctgccgccgttgcccggtggatatcttttccttccgcgaatgcggtcagcaagcctttgtcacgcgaaagatgcgccataatgcgcagttcaatctgcgagtagtccgctgagacaatcacataatcctctggcgcaataaacgcctggcggatacgacgaccttcttcgttacgcaccggaatgttttgcaggttaggatcggttgacgataaacgtcccgttgcagttactgcctggtgataagaggtatgcacacgcccggttttcgggttgatcatcagcggcagcttgtcggtgtaggtcgatttcagcttcgccagaccacgatactccagaatcacttttggcaacggatagtccagcgccagttcttccagtacctcttccgacgttgacggcgcgccacccggcgttttcttcagcggtttaatgccctgtttttcaaagagaatggtttgtaactgcttggtggaagaaaggttaaattcctcacctgcaatttcatgcgctttcttttccagctcagccagacgaagggtgagctcttcagaatgattgtgcagcactttcggatcgatcttcacaccgttacgttcaatgcgtgaaagcaccggcaccagcggcatttcgatattctcgaagacgttcaacggccctttgtgtttttgcagatccggccacattttcagatgcaactgcaaggtgacatctgcatcttcggcggcgtaacgtccggcttcttcgagggcaatctggttaaaggtcagttgatttttgcctttaccagcaatctcttcaaaagtgatggttttgtgcttcaaccaacgttccgcgaggctgtccatatcgtgacgcccggcaacgctattgagaatgtaggactccagcatggtatcaaacgcaatcccacgcagttcaatgccgtagttcgccagaataccgcgatcgtatttcaggttttgcccgaccttcagcgccttttcatcttccagcagcggttttagcaactcgagtgcacgctcgcgagagatttgatcgggcgcatcaagataatcatgagcaaccggaatatatgccgctacgcctggctcgatagcaaaagaaagcccgaccaggttagcagagatgttatcaaggctgtcggtttcggtatcaaatgcaaataccggcgctttttccagcttcgcaatccacgctttcagtgtttcttcatcaaggatggtgacgtagttgtcataagaaatcaccgttgccgtcacttctggtgcttcgtctgcaacactggtttcctgtggcttcgcggctggttttgcccctttggcctgtaaccatttgcccgcttcgacatcagcagtccagcgtttgaactcatactttttgaacagccccaacaactcttccgctgccggttgctgcacttccagttgttcacaggtcagctccagttcaacgtcggttttaatcgtcgccagctggtatgagagataagcaacttctttgttttgctcgagcttcgctgccattgttttcgcgccacggaagctcaacccagcaattttttctggctcggcatacagcgtatccagtccgccaagaccttgcagcaatgcctgcgcggttttttcaccgacgcccggtacgccaggaatgttatcagaggagtcacccatcagcgccaggaaatcgatgatcagttctggcggcacgccgtacttattcaccacctcttccggtccgaggatggtattcgtcatggtattgataagcgtaatatttggcgtcaccagctgcgccatatctttatcgccagtgctgatcagcaccggacgcccggctttttcggcttcgcgcgccagagtaccgataacgtcgtccgcttctacgccagaaaccgccagcagcggcagtcccatcgctttaaccatcgcgtgcaagggttcgatttgtgcacgcagatcgtccggcattggcgggcgatgtgatttgtaatgttcaaacagttcatcacgaaaggtttttcccttggcgtcaaagaccaccgctgcatgcgtcggtttatattgcatgatcagactgcgcagcatgttgaggacaccatacatcgcaccggtcggctcgcctgcgctgttagtcagcgggggaaacgcgtgatatgcgcgataaagataagatgaaccatctacaaggataagtggattttgggggatctgaaccataatgtccgtgcctgtttatcagattatgggtaaaggatgccacagacaggatgaaaacatgagtttttcaccgcttttcgtgaaaatcttttgtagatcttctggatcgctcgcaaatcgtcatgtggataactttgtgcataaattatttacatcgcttttaatttattatcatgctttttacagcatgatgtttgtctttgtttttcatgcagttaaaaataaatccatccctaataattgagataatgggattttttctaatgtggatagatatgaattatttttctccttaaggatcatccgttatttgggtcgttttctgctaaaatctgcgccttgcgcttctttagcgcactgtctatggctaaccttttgaataaattcattatgacgagaatactcgctgcgataacccttttgctgagtatcgtattgaccattttggtcactattttttgttccgtcccgatcatcattgccgggattgtaaaactattgctacctgtgccagtcatttggcgaaaggtttcgcgtttttgtgattttatgatgtattgctggtgtgaaggtctggcggtattactgcatctgaacccacaccttcaatgggaagttcacgggctggaagggttaagtaagaagaactggtatctgcttatttgtaaccaccgtagttgggcagatattgtcgtactgtgcgtgctgtttcgtaagcacattccgatgaataaatatttcctcaagcaacagctggcctgggtgccatttcttggcctggcgtgctggtcgctggatatgccgtttatgaagcgttattcccgcgcttatttattacgtcatccggagcgacgtggtaaagatgttgaaaccactcggcgttcttgtgaaaagtttcgcctgcatcccaccaccattgtcaatttcgttgaaggctcccgtttcacgcaagaaaaacatcagcaaacccactccacttttcaaaacttgttgccaccaaaggcggcaggcattgcgatggcgctaaatgtactgggtaaacaattcgataaactgcttaatgttacgctgtgttatccggacaataaccgtcagccgttcttcgatatgttaagcggtaaactgacgcggattgtcgtacatgtggatttacagcctattgccgatgagttacatggcgactacatcaatgacaaaagctttaagcgccattttcagcaatggctgaactcattgtggcaggaaaaagaccggcttctgacgtctctcatgtcatcacagcgtcagaataagtaagttttactcgcctctgaatgagcagaggcgagtgagtattttaatgaacaaaacgtccggcacgagacataaattcttcttcgctcatctcctgtccgttaaaaacaactttacccggtgtataacgcagctgcagcgaggcggtattgttgtcaatcgtgattaactgaaacatctgacctaatgtcatcatcccgctgatttgtttatcagcctgcttttgcgctttttccgcatccattccttcagataaattaagctgttttgcggtttctgtgacgacattaagcggtaacttcacatcaaaattgagcgatttgatatctttgtttgtggatgatgaagatttggctgggtcggcaatactgatatccagattggcatttagttcgccgagtgcgttcttccatcttaccggttgtttaatggtcggctcacttttttgtaataacggtaaatactctttgaacaatgcagcattcacttcttgcagagcaacttcatcgtttgctaactcagggtgtgcagcaagctgcttctgcatcgcaatgttatactggatgataaattggcgcactgctgagggatcaatagattcagcaatcaatgaccactcaccactaccgagttgctgattcccttttgttaacttatcaagttcgtaggtgagattgacattgatataatctttgtctttaacgcgatccagcctggtttttgcaacgaaagcatcgatttgggcaacgtcttccccgtgattgataatgttaatctgattaaatttcgactcgctttcaccaaccggaaatttcttttcttctaatcgcgccagagaatcaatggtaaaactttttgccgttactttgttcattggtgataattgcagaacaatatcttcgactttgccttcaatatccaggttagacaatgaactaccatcaccattaaaagtaaactggccctcaccaaaagaaaactttccatactctgcaggggcaacatctaatgtcgtagagaatgagccaccaaacgcgaatcgcaatgtcgcttccacgggcgatttatttttcgcggcgataaatagcggttgtgtcagttcattattcactaagttcacttttgccgctgccagtgctgggatgacattaccatgcattaacattgtgatgggcaacggaccgtgctcaacatccacatcaaatacaactttctggcctggcttgatattgagatcgggtgcaccgttatcgaatgtcatttgcatttgaaaacgggaattaaaaaagcctttgtcaaaattttgataacttaacgtcatatcgtaggcatgttcacctttctttttagcatcgttaaaatctttaataaatttttcgacaccaggctgaatttgcgtacctgtgtaccatgtgccaccaccccagattacggctaacgcaacaataacacctgtagctgacttacgtatcatataaatattccctgataaaacagcaaaactttgaatatccacttatgctgaaataatgtccagcggcaggatgcattatcagaatgtatttatatttattaaataataaaaaaagcccgtgaatattcacgggctttatgtaatttacattgaattattttttctcggacagatatttcactgtatcagcatactgctgaacaaaaacatccatattgctggtatccataccctgcggattcagctgatatttaccgttaacaaacatcgccggaacgccacgcaattgcacgtcagctgcagctttttcctgctgagcgaccagagatttcaccacgaagctgttccacgccgcgtcgtactcttcacctttaatacctgcgttgataaatacatcgcggatatcagaagcagaacgaatggtctgggttttctgtacgccttcaaacagcggaacagtcactttgtcttccacgcccagcgccatcgccacagcccatgcctgagtcagatctttgcccaggtcaccacccatgaagttgacgtggtatttagtcatcttcacgccttccggcagttttttcttcacattatcagaaatatgcagaacttcttcaaactgatagcagtgcgggcagaagaaagagaaaaactccagcacttgcggcgcgccagctaccggtttttccagggtagtgtactgtttaccatcttcatactgcgccgccgatgcgctaaacgctaaaactaaaccagccagcgccagccaaatctttttcatgatctactctctccgattaatacataggtgttaattgcaaagggggttcttgtagaacttttgcctgttctataaaagtcgccgtctgtcgcagccagtaatcttccccggttaaccacgggaaatttttcgggaacgcgggatcagcccaacgccgcattagccaggcaagataataaaccaaacgcatggcgcgtaaaggttcaatcagtccgatttcagcggtgtcgaactcgctaaattcttcataagcttcaataatagtttccagttgcatccgctgctcggctttatcgccattgagcaacatccacaaatcctgaacggctggaccattacgtgcatcatccagatcaacaaacattggaccatcgcgccagagaatattcccggcgtggcagtctccatgtagccgcagaacggtgaaatcttcccgccagtgtgctgtaacggcggcaatcagctcatctgtcgctttcaggaatgccgctttcaacccggaaggtatcagtgtagcgtcctcaaacagcttgcgtggctcaatgagatattcgttcaaaccgatggtcgggcgatggataaaaagctgtttgcgccccgtctggtgcatacgccctaaataacgcccaaccgcttccatctgatcgatattatcagcttcgaactggcgaccaccgacgcttggaaaaacagcgaaataaaatccctgatgattcaataaagtctgaccgttaaaggccacaggtgctgcgaccggaacttcatcatttaccagctgcaacgcaaattgatgttcttcgaggatttgatcggctgtccaacgttcagggcgataaaatttgacgacaaaacgtcgacgatcttcgtcctgaaattgatagacacggttttcatagctgttaagcggggtaagaccggaatccacccggatcccatgctcaaacagagcgtccatgatggtatccgggtgtagtgtctggaaagtaaaagcgctgttattcatcccatcatccggaaaacattacgaatgacgaaggatatcatttcacgatgattttggtggcgccgcttacaagcttttactctttaattacgccgcgagcgcgtaacagcgccgttttgaagtcttcttcataatctttctgcaaacccgggatcaccgcatctttcgcggaatcacgcattttcaggtgatagatcagaatgtcatccgtcaaatccgccagttcgccgtcaaaacctgactctttcgccagtttctgcaaaaattgcagcaggttaaggtctggctctttttgccaggctggctggaggagttcaataacttcattcagacgtttacatttcatagtgatgctccttactcttgagacagacacgttagcagggtcaatcccacaataaaagaggcgatatcggtgaatctgatgacgacgataacaggcgttgtgctggcaggcggtaaagccagacgaatgggcggcgtagataaaggattgcttgaattaaacggcaaaccattatggcaacatgtcgctgacgcgcttatgacgcagctctctcacgtcgtggttaatgctaatcgtcatcaggaaatctatcaggcaagcggtctgaaagtgattgaagattcactggcggattacccaggccctctggcaggaatgctttcagtaatgcagcaggaagctggtgagtggtttttgttttgcccgtgcgatacgccttacattccccctgatttagcagccaggcttaatcatcagcgcaaagatgcgcctgtcgtgtgggtccatgacggtgaacgcgatcacccgactattgctctggtaaaccgcgctattgagcctttattactggaatatctgcaagcaggagaacgccgggtaatggtatttatgcgtctggctggcggtcatgcggttgatttcagcgatcataaagatgcatttgttaacgtgaatacgccagaggagcttgcccgatggcaggaaaaacgatgataccgttactcgcctttgccgcgtggagtggtaccggaaaaactacgcttttgaaaaaactgatcccggcattatgcgccagagggatccgtccagggctgattaagcatacgcaccatgatatggatgttgataagccaggcaaagatagctatgagctgcgcaaggctggcgcggcacaaaccatcgttgccagccagcaacgatgggccttgatgacggaaacaccagacgaagaagagctggatctacagtttctcgcaagtcgaatggatacctcaaagctggatttgattctggtcgaagggtttaagcatgaagagatcgcaaagattgtgctgtttcgcgatggagccggacatcgacctgaagaattagtgatagacaggcatgttattgctgtagccagtgatgtgccgcttaatcttgatgtcgcattactggatattaatgatgttgaggggctggctgattttgtggtggagtggatgcaaaagcagaacggataagcaagagtaggctggataagacgcgccagcgtcgcatccggcatttttttctgcgccaatgcaaaaaggccatccgtcaggatggccttctgcttaatttgatgcctggcagtttatggcgggcgtcctgcccgccaccctccgggccgttgcttcgcaacgttcaaatccgctcccggcggatttgtcctactcaggagagcgttcaccgacaaacaacagataaaacgaaaggcccagtcttccgactgagcctttcgttttatttgatgcctggcagttccctactctcgcatgaggagaccccacactaccatcggcgctacggcgtttcacttctgagttcggcatggggtcaggtgggaccaccgcgctactgccgccaggcaaattctgttttatcagaccgcttctgcgttctgatttaatctgtatcaggctgaaaatcttctctcaatccgccaaaacaccttcggcgttgtaaggttaagcctcacggttcattagtaccggttagctcaacgcatcgctgcgcttacacacccggcctatcaacgtcgtcgtcttcaacgttccttcaggactctcaaggagtcagggagaactcatctcggggcaagtttcgtgcttagatgctttcagcacttatctcttccgcatttagctaccgggcagtgccattggcatgacaacccgaacaccagtgatgcgtccactccggtcctctcgtactaggagcagcccccctcagttctccagcgcccacggcagatagggaccgaactgtctcacgacgttctaaacccagctcgcgtaccactttaaatggcgaacagccatacccttgggacctacttcagccccaggatgtgatgagccgacatcgaggtgccaaacaccgccgtcgatatgaactcttgggcggtatcagcctgttatccccggagtaccttttatccgttgagcgatggcccttccattcagaaccaccggatcactatgacctgctttcgcacctgctcgcgccgtcacgctcgcagtcaagctggcttatgccattgcactaacctcctgatgtccgaccaggattagccaaccttcgtgctcctccgttactctttaggaggagaccgccccagtcaaactacccaccagacactgtccgcaacccggattacgggtcaacgttagaacatcaaacattaaagggtggtatttcaaggtcggctccatgcagactggcgtccacacttcaaagcctcccacctatcctacacatcaaggctcaatgttcagtgtcaagctatagtaaaggttcacggggtctttccgtcttgccgcgggtacactgcatcttcacagcgagttcaatttcactgagtctcgggtggagacagcctggccatcattacgccattcgtgcaggtcggaacttacccgacaaggaatttcgctaccttaggaccgttatagttacggccgccgtttaccggggcttcgatcaagagcttcgccttgcggctaaccccatcaattaaccttccggcaccgggcaggcgtcacaccgtatacgtccactttcgtgtttgcacagtgctgtgtttttaataaacagttgcagccagctggtatcttcgactgatttcagctccacgagcaagtcgcttcacctacatatcagcgtgccttctcccgaagttacggcaccattttgcctagttccttcacccgagttctctcaagcgccttggtattctctacctgaccacctgtgtcggtttggggtacgatttgatgttacctgatgcttagaggcttttcctggaagcagggcatttgttgcttcagcaccgtagtgcctcgtcatcacgcctcagccttgattttccggatttgcctggaaaaccagcctacacgcttaaaccgggacaaccgtcgcccggccaacatagccttctccgtccccccttcgcagtaacaccaagtacaggaatattaacctgtttcccatcgactacgcctttcggcctcgccttaggggtcgactcaccctgccccgattaacgttggacaggaacccttggtcttccggcgagcgggcttttcacccgctttatcgttacttatgtcagcattcgcacttctgatacctccagcatgcctcacagcacaccttcacaggcttacagaacgctcccctacccaacaacacatagtgtcgctgccgcagcttcggtgcatggtttagccccgttacatcttccgcgcaggccgactcgaccagtgagctattacgctttctttaaatgatggctgcttctaagccaacatcctggctgtctgggccttcccacatcgtttcccacttaaccatgactttgggaccttagctggcggtctgggttgtttccctcttcacgacggacgttagcacccgccgtgtgtctcccgtgataacattctccggtattcgcagtttgcatcgggttggtaagtcgggatgacccccttgccgaaacagtgctctacccccggagatgaattcacgaggcgctacctaaatagctttcggggagaaccagctatctcccggtttgattggcctttcacccccagccacaagtcatccgctaatttttcaacattagtcggttcggtcctccagttagtgttacccaaccttcaacctgcccatggctagatcaccgggtttcgggtctataccctgcaacttaacgcccagttaagactcggtttcccttcggctcccctattcggttaaccttgctacagaatataagtcgctgacccattatacaaaaggtacgcagtcacacgcctaagcgtgctcccactgcttgtacgtacacggtttcaggttctttttcactcccctcgccggggttcttttcgcctttccctcacggtactggttcactatcggtcagtcaggagtatttagccttggaggatggtccccccatattcagacaggataccacgtgtcccgccctactcatcgagctcacagcatgtgcatttttgtgtacggggctgtcaccctgtatcgcacgcctttccagacgcttccactaacacacacactgattcaggctctgggctgctccccgttcgctcgccgctactgggggaatctcggttgatttcttttcctcggggtacttagatgtttcagttcccccggttcgcctcattaacctatggattcagttaatgatagtgtgtcgaaacacactgggtttccccattcggaaatcgccggttataacggttcatatcaccttaccgacgcttatcgcagattagcacgtccttcatcgcctctgactgccagggcatccaccgtgtacgcttagtcgcttaacctcacaacccgaagatgtttctttcgattcatcatcgtgttgcgaaaatttgagagactcacgaacaactttcgttgttcagtgtttcaattttcagcttgatccagatttttaaagagcaaaacttcgcagtgaacctttgcaggtacactctgaagtattttttatttaatcactacagagatggtggagctatgcgggatcgaaccgcagacctcctgcgtgcaaagcaggcgctctcccagctgagctatagccccataacatgtagttaaaacctcttcaaatttgccgtgcaaatttggtaggcctgagtggacttgaaccaccgacctcacccttatcaggggtgcgctctaaccacctgagctacaagcctgtagaggttttactgctcattttcatcagacaatctgtgtgagcacttcaaagaacgcttctttaaggtaaggaggtgatccaaccgcaggttcccctacggttaccttgttacgacttcaccccagtcatgaatcacaaagtggtaagcgccctcccgaaggttaagctacctacttcttttgcaacccactcccatggtgtgacgggcggtgtgtacaaggcccgggaacgtattcaccgtggcattctgatccacgattactagcgattccgacttcatggagtcgagttgcagactccaatccggactacgacgcactttatgaggtccgcttgctctcgcgaggtcgcttctctttgtatgcgccattgtagcacgtgtgtagccctggtcgtaagggccatgatgacttgacgtcatccccaccttcctccagtttatcactggcagtctcctttgagttcccggccggaccgctggcaacaaaggataagggttgcgctcgttgcgggacttaacccaacatttcacaacacgagctgacgacagccatgcagcacctgtctcacggttcccgaaggcacattctcatctctgaaaacttccgtggatgtcaagaccaggtaaggttcttcgcgttgcatcgaattaaaccacatgctccaccgcttgtgcgggcccccgtcaattcatttgagttttaaccttgcggccgtactccccaggcggtcgacttaacgcgttagctccggaagccacgcctcaagggcacaacctccaagtcgacatcgtttacggcgtggactaccagggtatctaatcctgtttgctccccacgctttcgcacctgagcgtcagtcttcgtccagggggccgccttcgccaccggtattcctccagatctctacgcatttcaccgctacacctggaattctacccccctctacgagactcaagcttgccagtatcagatgcagttcccaggttgagcccggggatttcacatctgacttaacaaaccgcctgcgtgcgctttacgcccagtaattccgattaacgcttgcaccctccgtattaccgcggctgctggcacggagttagccggtgcttcttctgcgggtaacgtcaatgagcaaaggtattaactttactcccttcctccccgctgaaagtactttacaacccgaaggccttcttcatacacgcggcatggctgcatcaggcttgcgcccattgtgcaatattccccactgctgcctcccgtaggagtctggaccgtgtctcagttccagtgtggctggtcatcctctcagaccagctagggatcgtcgcctaggtgagccgttaccccacctactagctaatcccatctgggcacatccgatggcaagaggcccgaaggtacccctctttggtcttgcgacgttatgcggtattagctaccgtttccagtagttatccccctccatcaggcagtttcccagacattactcacccgtccgccactcgtcagcaaagaagcaagcttcttcctgttaccgttcgacttgcatgtgttaggcctgccgccagcgttcaatctgagccatgatcaaactcttcaatttaaaagtttgacgctcaaagaattaaacttcgtaatgaattacgtgttcactcttgagacttggtattcatttttcgtcttgcgacgttaagaatccgtatcttcgagtgcccacacagattgtctgataaattgttaaagagcagtgccgcttcgctttttctcagcggcgcggggtgtgcataatacgccttcccgctacagagtcaagcatttatttttgctttctctgccggagttctcaggagaaccccgctgacccggcggcgtgtttgccgttgttccgtgtcagtggtggcgcattatagggagttattccggcctgacaagaggaaatttaaaataattttctgaccgcgcattttttattctttatgcttatttcagcgtcggtttgtcggttaaatgggcgatttctcgggcgaaattcgccacctgctcccaatcggtatagacaacttctttgcgcgtatccgtttcaccgcctgacatcttcataatcagcttgatcataaaacggtcgtaccagcgataacgtgggtaacgcagcgccccggcaatgaccgcgcagcgatcgggacgccattgcgagttcatcagaaacttgcgcgcgtagctgttggtctgtggagtacgcttctccggtttgcgcgccaccagattcacggagtaaaaggcgctcggcatcgaattcagccgcgtcgcatgttttttgacaaattcctggaacgctgaatggtagtgaccatagcgaatagaagcaccaatgaccacacggtcatagttttcccactgtggttcttcaatgcggtgcacattggcgacatccgcctggatccccagttctttcagttccgaagccaggtaggaggcaatctcgcgcgtttgtccgtcccttgttgagaaaagaattaatgttttcacgtattactccatcattcacgccagaaagtcggggtaaagagcaccagcaatgtaaagacctcgagacgaccaaacagcatgttggcaatcaggatccatttagccaccgggttcatactggtaaagttatcagcaaccacgccaagccctggccccaggttattcaatgtcgcaacaaccgacgcaaaggcagaaaagtcatccacgcccgtggcgataatcgccagcatactgacaataaacaccaatgcataggcggagaaaaatccccaaacggcttcgaggatacgttccggcagtgcgcgattccccagcttaatgctatagacggcgttcggatgcaccagtcgtttcagctcacggttcccctgcttaaacagcagcaggatgcggatcaccttcaggccaccgcccgttgacccggcgcaaccgccgataaaggctgaacataaaagcagtaccggcaaaaagagcggccagcgggcaatgctgtcagttgtaaacccggcggttgtcgccatcgacaccacctggaaaaacgcctggttaattgtcatcagcgccgaactgtagacattatgaaaccacagtacgagggtacaaataaccaccagcgtaaactgtacgccgataaacatgcgaaattccggatcgcgccaataaaccttcagactacgcccacttaacagtgaaaagtgcagaccgtagttacagccggagatcagcaggaagatagcaatgatagtgttaatagtcgggctatcgaaataaccgatactggcatcatgtgtcgagaagccgccaatagcgatagtcgcaaagctatggccgatggcatcaaaggcatccattccggcaaaccacaacgccagcgcacaggcgacggtcagcaagacataaatcaaccacagggttttcgccgtttccgcaattcgcgggcgcattttgttatctttcagcgggccgggcatttctgcgcgatagagctgcatcccacccacgccgaggataggcagtatcgcaaccgccaacacgatgatccccatcccgccaaaccattgcagcatctggcgataaaagaggatggcgtgagggagcgaatccagccccaccagcgtagtggctcccgtagtggtcaggccagagaaagattcaaaaaacgcatcggtaatcgtgaggttcgggctttccgagaagataaaagggagcgcaccgacgctacccagcacggtccagaacagcaccactatcagaaacccctcacgggatttaagttcgcctttctctttgcggttcggccaccacagcatagagccaatggcgagggcgacaaaaaaggtctgggtaaaagcgcggcccgctccatcccggtagatgagtgctaccagcccagggataatcatggtccctgaaaataagatgaccagtagtccaacgattcgggtaatggcgcgaaaatgcatctctgccgcttccttagttctgcaaaacgaagtggggattattcttcaatcgctaacaattgcaatgaaccacggctaaaatccgccagctttgcggaaaattcagccactttcgccgccggaagcgccacccgcagcagaacgaatgcctgataatcactgttgataattttgccgtcacactgccccagcaacgcttcaatgccggttaactgatgatattcacattgcaaagtatattcggttaatggcgtcttgcgttgggtcgttagctggcgcagcgcctgattcacgccgccgccatacgctttcactaacccaccggtgccaagcaatatgccgccgtagtagcgcactaccacagcggtaatttccccgacgccgctgcccattagctgggcgagcatcggtttacctgccgttcccgccggctccccgtcgtcagagaaacccagctgttgagaatcatccggcgcacccgcgacccacgccacgcaatggtgccgggcatcggggtgttctgcccgcaccgattcaacaaacgctttcgccgcctcaacgccatcggtatgcgccaacatcgttatgaagcggctctttttgatctcttcaacgaccgtgaccggtgccgcaggaattaaccagctttccatcacgccagtttcagatcccgggtcatgttttccacgttgttttcgtggatcaccacgttgtcttcgatacgaatgccgccgaacggtttcagtgcttcaattttctgccagttgaagtgcttgctgaactgcccttcacgccacggtgccagtagcgattcgatgaagtagatacccggttcgatggttaacaccatgcccggctggagaatacgggtgcagcgcaggtacggatattttgccggtgccgcgaggtgcgtaccgctatcatcctgcataaaaccagcgacgtcatgcacctgcaggcccagcggatggccgataccatgcggcataaacggcccggtaagatcgttttcgaccatcgcttcttcactcatatcggtgatgatttgatgtttacgcagcagtttggcgatgcgctgatggaactggatgtggtaatccacatagctgacgcctgctttcatggtggcgatcagcgccagttgttcatcattaacgtccttcaccagctgcgcgtagtcgttgtcactttttgccgaccaggtacgggtcaggtcagccgcatagccgttatattctgccccggcatccagcaggaagctgcgcatctcttccggtgcctgatggtccagtttggtgtaatgcagtaccgcagcgtgttcgttaagcgccacaatgttgctgtaaggtacgtcggtatcacgatgaccggtcgcggtcagataggcaatgttgatatcgaactcgctcatgccagaacggaacgcttcttctgccgcgcggtgaccgttgaccgccattttctgcgcttcacgcatacaggccagttcgtactcagttttgaaggagcgatagtaatgcaggtagtcgataacccctttcgggttgatgttgctggcctcaatacccagttgcagcgcacgttccggcaccggaccgatataaccgatattgccgcgcgcagcaggcagcaggctaccaatgccatcggctttcggcagcgcgatcacttccacatcttcagtccagaaagaggtcggcagcggttcgacgttgtgccagtaatcaaccggcagatagaaccacagtttcggcttgttcacgccatccaccagcaaccagcagtttggcacctgagttaccggcacccacgctttgaattgcgggttcactttaaacggatagggatgatcgtcgagaaaaacattgaacagctcgccggagtgaataagtaacgcatccagcttgaagcgcgccagcgcatcgcgagtccgttcttgtaaggtagctatatgatttttatagagcgaggccagtgattccattttttacccttctgtttttttgaccttaagtctccgcatcttagcacatcgttcatccagagcgtgatttctgccgagcgtgatcagatcggcatttctttaatcttttgtttgcatatttttaacacaaaatacacacttcgactcatctggtacgaccagatcaccttgcggattcaggagactgacatgctttacaaaggcgacaccctgtaccttgactggctggaagatggcattgccgaactggtatttgatgccccaggttcagttaataaactcgacactgcgaccgtcgccagcctcggcgaggccatcggcgtgctggaacagcaatcagatctaaaagggctgctgctgcgttcgaacaaagcagcctttatcgtcggtgctgatatcaccgaatttttgtccctgttcctcgttcctgaagaacagttaagtcagtggctgcactttgccaatagcgtgtttaatcgcctggaagatctgccggtgccgaccattgctgccgtcaatggctatgcgctgggcggtggctgcgaatgcgtgctggcgaccgattatcgtctggcgacgccggatctgcgcatcggtctgccggaaaccaaactgggcatcatgcctggctttggcggttctgtacgtatgccacgtatgctgggcgctgacagtgcgctggaaatcattgccgccggtaaagatgtcggcgcggatcaggcgctgaaaatcggtctggtggatggcgtagtcaaagcagaaaaactggttgaaggcgcaaaggcggttttacgccaggccattaacggcgacctcgactggaaagcaaaacgtcagccgaagctggaaccactaaaactgagcaagattgaagccaccatgagcttcaccatcgctaaagggatggtcgcacaaacagcggggaaacattatccggcccccatcaccgcagtaaaaaccattgaagctgcggcccgttttggtcgtgaagaagccttaaacctggaaaacaaaagttttgtcccgctggcgcataccaacgaagcccgcgcactggtcggcattttccttaacgatcaatatgtaaaaggcaaagcgaagaaactcaccaaagacgttgaaaccccgaaacaggccgcggtgctgggtgcaggcattatgggcggcggcatcgcttaccagtctgcgtggaaaggcgtgccggttgtcatgaaagatatcaacgacaagtcgttaaccctcggcatgaccgaagccgcgaaactgctgaacaagcagcttgagcgcggcaagatcgatggtctgaaactggctggcgtgatctccacaatccacccaacgctcgactacgccggatttgaccgcgtggatattgtggtagaagcggttgttgaaaacccgaaagtgaaaaaagccgtactggcagaaaccgaacaaaaagtacgccaggataccgtgctggcgtctaacacttcaaccattcctatcagcgaactggccaacgcgctggaacgcccggaaaacttctgcgggatgcacttctttaacccggtccaccgaatgccgttggtagaaattattcgcggcgagaaaagctccgacgaaaccatcgcgaaagttgtcgcctgggcgagcaagatgggcaagacgccgattgtggttaacgactgccccggcttctttgttaaccgcgtgctgttcccgtatttcgccggtttcagccagctgctgcgcgacggcgcggatttccgcaagatcgacaaagtgatggaaaaacagtttggctggccgatgggcccggcatatctgctggacgttgtgggcattgataccgcgcatcacgctcaggctgtcatggcagcaggcttcccgcagcggatgcagaaagattaccgcgatgccatcgacgcgctgtttgatgccaaccgctttggtcagaagaacggcctcggtttctggcgttataaagaagacagcaaaggtaagccgaagaaagaagaagacgccgccgttgaagacctgctggcagaagtgagccagccgaagcgcgatttcagcgaagaagagattatcgcccgcatgatgatcccgatggtcaacgaagtggtgcgctgtctggaggaaggcattatcgccactccggcggaagcggatatggcgctggtctacggcctgggcttccctccgttccacggcggcgcgttccgctggctggacaccctcggtagcgcaaaatacctcgatatggcacagcaatatcagcacctcggcccgctgtatgaagtgccggaaggtctgcgtaataaagcgcgtcataacgaaccgtactatcctccggttgagccagcccgtccggttggcgacctgaaaacggcttaaggagtcacaatggaacaggttgtcattgtcgatgcaattcgcaccccgatgggccgttcgaagggcggtgcttttcgtaacgtgcgtgcagaagatctctccgctcatttaatgcgtagcctgctggcgcgtaacccggcgctggaagcggcggccctcgacgatatttactggggttgtgtgcagcagacgctggagcagggttttaatatcgcccgtaacgcggcgctgctggcagaagtaccacactctgtcccggcggttaccgttaatcgcttgtgtggttcatccatgcaggcactgcatgacgcagcacgaatgatcatgactggcgatgcgcaggcatgtctggttggcggcgtggagcatatgggccatgtgccgatgagtcacggcgtcgattttcaccccggcctgagccgcaatgtcgccaaagcggcgggcatgatgggcttaacggcagaaatgctggcgcgtatgcacggtatcagccgtgaaatgcaggatgcctttgccgcgcggtcacacgcccgcgcctgggccgccacgcagtcggccgcatttaaaaatgaaatcatcccgaccggtggtcacgatgccgacggcgtcctgaagcagtttaattacgacgaagtgattcgcccggaaaccaccgtggaagccctcgccacgctgcgtccggcgtttgatccagtaaacggtatggtaacggcgggcacatcttctgcactttccgatggcgcagctgccatgctggtgatgagtgaaagccgcgcccatgaattaggtcttaagccgcgcgctcgtgtgcgttcgatggcggtcgttggttgtgacccatcgattatgggttacggcccggttccggcctcgaaactggcgctgaaaaaagcggggctttctgccagcgatatcggcgtgtttgaaatgaacgaagcctttgccgcgcagatcctgccatgtattaaagatctgggactaattgagcagattgacgagaagatcaacctcaacggtggcgcgatcgcgctgggtcatccgctgggttgttccggtgcgcgtatcagcaccacgctgctgaatctgatggaacgcaaagacgttcagtttggtctggcgacgatgtgtatcggtctgggtcagggtattgcgacggtgtttgagcgggtttaaccacttgccggatgcggcgtgaacgccttatccggtctaccgatccggcaccaatgtaggcctgataagacgcgccagcgtcgcatcaggcatcatgcaccaattgccggatgcggcgtaaacgccttatccggcctacggttcggactatttgtaggcacgataagacgcgacagcgtcgcatcaggcatcatgcaccaattgccggatgcggcgtaaacgccttatccggcctacggttcggactatttgtaggcacgataagacgcgacagcgtcgcatcgggcatggtttgccagatacgtcatagatctaaatgccactgaataacagtttagttgccgttcttcccgcctgtcaggggcgggtttttttatatctcagataaatgcaaacgcatcgccaaacaggcgatcttcccgcgcattacgctcactgcaaaacagatcgcgggcaattttcgccatctcaaaacgtccggcaatatagatatcatgctctgccagcgtaccgtgatcctgcaataccgccgttaacacggtgccagtacgcccacgccagcccgcttccggttgttcaaccaccggcaccacttgcagaccaggatgcttcaacgaaagcgcctcaagctcgcagagatcatacagatgctgctcttcacgcccgccccagtaaatggtgatatcacggtttgggttacgcgccaacgctgtcagcaaaatcgagcgggcataagagaacccggtgccgcccgcaatcaaaatcatcggacgctcttcatcatcgcgcagccacgcttctccgtggggaatgtcgaccacgatttgatgatctttgaggatgcggtccatgactgctttcgcgtaaaggttgatttcagaagcgccaatatgcagctcgataaaccctttttcatccggcgtcgaagccattgagaacggacgtttgtcgcgctcatccatcactaccatcaaatactgaccagcacgaaaagaaaaggccgcgtctggcacgatgcggacacgatatacggtatccgtgatagcttctaccgaggtcactttacagcttaaggttgtcatgcgctttctctgtcggatcgataaatagggcaaaacaaacgcgcatcaggcgcttttaccgttgttaaaaatagccagttcatcccagatggcgtcaatatgcgcgacaacatctggatcttttttgatgggacgtccccattcacgctgggtttcccccggccatttattcgtggcatccagccccatttttgaacccagcccggagacaggcgaggcaaaatccagataatcaataggcgtattttctaccagaacagtatcccgcgccgggtccatacgggtggtaatcgcccaaatcacatcgttccagtcgcgtgcgttaacgtcatcatcgcaaacgatcacaaatttagtgtacataaactggcgtaagaacgaccagacgcccatcatgacgcgcttcgcgtgtccggcgtactgttttttgattgtcactaccgccaggcgataagagcagccttccggcggcaggtaaaaatcgacaatttccgggaactgtttttgcagaatcggcacaaacacttcgttcagtgcgacacccagcaccgcgggctcatctggcggacgcccggtataggtggaatggtaaatcgcatcttcacgctgggtaatatgcgtcacggtaaataccgggaaactatcgacttcattatagtaaccggtgtggtcgccatacggcccttccggcgcagtttcgccttgttcgatatacccttccagcacaatctccgcactggcgggcacttcaagatcattggagatacacttcaccacttcggtcttggtgccacgtagcaatccggcaaacgcatactctgaaagcgtatccggaacgggagtgactgcaccgagaatcgtggcgggatcggcacccagcgccacagaaaccgggaaacgttcgcccggatgcgccgcacaccactcctgataatccagcgcgccgccgcgatgcgacagccagcgcataatcagtttgtttttaccaatcagctgctggcgataaatgcccagattctgccgctctttatgtgggccgcgcgtcactgtcagcccccaggtaatcagcggcgcggcatcttccggccagcaggtcataatgggaatgcgattgagatcgacgtcatcgccagagacgattttttgttggcagggcgcaccacgcagccgctttgtcggcatgttcaatacttgcttaaactgcggcagtttatcaaacaggtcgcggaaaccttttggcggctccggctctttcagaaacgccaataatttaccaacttcacgcagcgccgaaacatcttcctgccccatgcccatcgccacgcgctttggcgtaccgaacaggttgcacagcaccggcattgagtagcctttagggttttcgaacaacagcgcaggcccaccggcacgcaaagtgcggtcagcaatttcagtgatttccagatgcggatccaccgggagcgtgatacgttttagctcaccctgctgttcaagcagcgtcaagaagtcgcgtaaatcgttatatttcatggcgtccattgtagcctcttaatctgcgcccattatacggcgttcatctttgcgatgctgtaaatttgttaaattagcgtgaactctgacggtataacgcaaaccggggaatataattaacttagcgtaaagcttttgctatccttgcgccccgattaaacggataagagtcattatgcaatcctggtatttactgtactgcaagcgcgggcaacttcaacgtgcccaggaacacctcgaaagacaggctgtgaattgcctggcaccgatgatcaccctggaaaaaatcgtgcgtggaaaacgtactgcagtcagtgagccattgttccccaactacctgtttgtggaatttgacccagaagtgattcataccacgactatcaacgcgacccgcggtgtcagccacttcgtgcgctttggcgcgtcgccagcgatagtcccatcggcggttattcatcagctatcggtatataaaccgaaagacattgtcgatccggcaaccccttatccgggtgataaggtgattattaccgaaggcgcgttcgaaggctttcaggccattttcaccgaacccgatggtgaggctcgctccatgctattgcttaatcttattaataaagagattaagcacagtgtgaagaataccgagttccgcaaactctaaaacgcaatcccaaacagtgttttgacattagcatccgtggtggcagccagccatgcggcatcttctccacgccagtgcgcaatacgttgcaaaatatggggcagatgggctggctcgttgcgccgggatgatggctttggcgtgagatcgcgagggagcagatacggcgcatcagtttcgatcagtaatttttccgccggaatcaacggcaaaagttcccgcagctccagtccgcgtcgttcatcgcaaacccaaccggtaatgccgatataaattccatgcgccacgcacgcctgcatctcttcgcgtgtgccggtaaagcaatgaagaaccgcaccaggcagtttatccagccacggctccagcaatgtcataaaccgctcgtgggcatcgcgacagtgcataaataccggcatgtttaaatctgcggcaatgcgtagctgggcaacaaaagcgcgttcctgctcttccggcgtcgaaaagttgcggttaaagtcgagaccacattcaccaatcgccaccacttctggctgcgcggccagctcaataatcgcttcttcagtcgcagcttgccactggctgctgtcgtgaggatgtacgcccgccgttgaccaacaggacgaatactgacgcgccagcttttgcgcctgctggctttcacgcaggttagtgccggtgatgagtagcccattaactcccgcgtcaaaagcgcacgctacaacatcatcacggtctttcgcaaattgcgaactggtcaaattaacgccgatatcaaacatcctgtactccatatgacaaccgccctgacgggcggttgaatttattcttcagttttttcgctttctgcttcagcgtcgttttcctcttcccgatttcgccctttaccaacgtaaaagcgtgagaagaagacaccgatttcaaacagacagtacatcgggatcgccaacagcgtttgcgagaagacatccggcggcgtcagcaacatcccgacaacgaatgcaccaaccagcacatacgggcgttttttgcgtaagtcttctggcgaggtaatccccatccagcacagcagcacaattgctaccggcacttcaaaggagacaccaaacgccataaacagcgccataacgaagcttaaatagctggcgatgtcggtggatacctgcaccccttccggcgcggtattggcaaggaagccaaatgccagcggaaagaccacaaagtaggcgaatgccatgccgatataaaacagcagagagctggaaaccagcagcggcaccaccaggcgacgttcatgcttatacagcgctggggcgataaatgcccacacctgatagagaatcaccggcgctgacagaatcagcgacaccataaaggtcagcttgatcggcgtaaagaacggcgaggccacgtcggtggcgatcatcgttgaaccttgcggcaactgcttgatcaatggcgcggataccaggtgatagatgtcattggcgaaatagaccagacacaggaatatcacgatcaccgcgataatgcagttcagcagacgcttacgcagctcaatcagatgcgtgataagcggttgagtatcttctacagacatgtttacggtttatcactcgacgaaggggaaggtgcagcggttttcggttcagcgtccgcagcaggttttaccaccggctctggcgtggtttctggcttctgttccggcgaactggcctgcgtttgtgcagcggcaggcgttacgccctcatgcgcagcttcattatctttcaccaccgggttatggatggtgtgcgcttcatcgctcgccttttcaggatcgtttgcaacgtaggaacgcttcatcgactccgcggcctggcgtagttcatccatcgacgctttcagttcgggcgtcaggttagtgaggctcgccttttcaacctttttcagactgtcctgaaactcctggagttttaactcctgggtcagttcgttctgcaccgttgtcgccagtgaacgcaacgcgcgaatccagcccgctaccgtttttaccgccacaggcagtcgttgcggccccagaacgacgaggccgatgatgaacaccaatagcagttcgctaaaaccgatatcaaacacggattacacctgctctttatcgtggcgcttcgcgtcttctgttttagcctgttcctgattcgtatccgcctgcttatcggcgatagttttcgcagtaaaatcagcatcctgactggttttatcctgctttggttcatcatcgctcattgcttttttaaagcctttgatcgacgcaccaagatcggaaccgatggagccgagctttttggtgccaaaaagcagtacaacgatgacggcaataatcaataactgccaaatactgataccacccatacatgttcctctgtggtagatgatgattaaacaaagccgcattatacgttacacggcccgccttgagcgatgaaaaaatcagcgtgttttgcgccaaccgacaaaccaggcgatcagaccacctgccattaaccagccgggcatcagcccccattcaggtcggctgaccaacaagaatgtgccacttaatactaacgtagcgccaattccgagaaaataacgcgattgtccctgacgtacatgatttgactgaagctcgcgggcaatcttatcaacactgtgctgtaaatacttgccctggcgcaaactgtcgtaaaccaattcaggcagttctggcattttttcgacccagaacggcgctttttctttaaatgctctcaccagcgcaggaataccgacctgatctttaatccacgactccaggaaaggcttcgccgttttccataaatcgagttgcggataaagctggcgtcctaccccttcgacgtagagcagggttttctggagtaacaccagttgcggctgcacttccatattgaagcgacgcgccgtattaaacagatttaacagtacatgtccaaacgaaatttcggccagcggtttctcaaagataggttcacagaccgtacgaatggcaaattcgaactcttcaacgttggtatctggtggcacccagccagaatcgacgtgtagctctgccactttgcgatagtcgcgattaaagaaggcgataaagttttctgccagatagcgtttatcttctttgtttagcgagccaacaatcccgcaatcaatgccgatatatttcgggttttccgggtgttcatagcttacgaagatgttgccagggtgcatatcggcatggaaaaagctgtcgcgaaagacctgagtgaagaacacctgcacgccgcgttccgccagcaatttcatgttagtgccgtttttctccagcgccgcaacatcagacaccggaatgccgtaaatgcgctccatcaccatcatcccttcactacaatagtcagggtaaacttccgggatgtagagcatcgggctgtcttcaaaattgcgccgaagctgaatggcgttggcagattcccgcagcaaattcagttcatcaatcaatgtcttttcgtactcgcgcaccacttcggttgggcgcagacggcgaccatccggcagcaaacgcggcacccagcgagccagacggtagataagtttcagatccgctttaataaccggcaaaatatccgggcggatgactttaatcaccacctctttaccattcgatttcaatcgcgcggtatgaacctgggcgatagaagcagaagccagcggcttgatttcaaaatcgtcaaaccacgcttctaccggcaagccgcccattgcagcttcaatctgctgcttcgccagcttgccatcaaacggagcaactttgtcctgcaataacgccagctgatcggcaatatgcggtggaaaaagatcgcggcgggttgataacatttgcccgaacttgatccaaaccggccccagttcttgcagggccagtcgtagtcgctcacctaaaagtttgtctttatgccgatttggcatccagaataatgagtatcgccatagccgtagcggcagggtgatacgcattttggggatcagttcatcaagtccgtagcttaaaaaagtgcgaatgatgaaatataggcgccgtacttcacctggcgtcatttagcctccagtttttccagccgtttggtcagggcatcaacagcacgctcgacggcagccgtctcttccgcaaaccaggccacttcaagcggaccgggtgccatacgccactcttcagtaatggcttccgccacataacgttgctggcgcttaatgccgtgatgcaggaactttgcgcctccgcgcatggctttgctgattccttcagcggcgatatcaccggtataaggggccagcagttccgcagggtcgaactctgccagatctgccagcgcaacgaagttttgcaccacctgaatatcgccctgcacttccagctcaccactgcgaatcagtgcggtaagctgctggcgatcgcgaagtttcggcaacacactggcgtaggcgataacggtgcagtcagcatcgcctgcccattcgcccagtacatcaacctggcgttcgctgaacaccagaatcaatgacgtcgaaaagccttttacctccacgcgcaatactttacccagcagacgcgagcgggccgttttcagcgcgggtgagcgatacaggaaggtgttgagcagactttcaattcctgccgtcactaaaggtttaaaaggcatttccggtctcctgtcagaacttataaccacgatgcagcgccacaacccctgccgtcagattgtagtagtcgacactttcgaatccggcatcctgcatcatggctttcagggtatcctgatcgggatgcatacggatggattctgccagataacggtagctgtcggcgtcgttcgcgaccagtgagccaatacgcggcagcacatggaaggagtatgcatcataggctttgctcagcggctcgataattggcttcgagaactcaagcaccagcaggcggccgccgggtttcagcacgcgatacattgaacgcagtgctttatctttgtcggtgacgttacgcagaccaaacgaaatggtgatgcaatcaaaggtgttatccgggaacggcagcgcctcagcgttcgcctgaacatactcaacgttgccaatcacaccgatattacgcagcttctcgcggcccattttgagcatggattcattgatatcagcaaggaccactttgccagtttctccgaccaggcgggagaatttcgctgtcaggtcgccggtgccaccagccagatccagcacggtctgcccacggcgtacgccgctgcaatcaatcgtgaatcgcttccacaaacgatgaataccaaatgacatcaaatcattcatgacatcgtattttgatgccacggaatggaaaacgtgggcgaccatatccgctttttgttccttcgcgacggtctgaaaaccaaagtgcgtcgtttcttgtgacttatccaccatctcaatgcctgctcatcaaaaaattgttccagaagtgtaacagattgggcgtcgatgccctagatttctacccggcttaactactcccaatgggctagcgcgactgctgattatattcatcatcgcgttgataagcttcatcattcggctgctccggaaccgaccgaagtcgatactcttcatcctggctcaccgcctgttcagccaaatccggattaatctcgcgtttaatttctactcctaaaccgcgaaacgcttctgcctgcgccagcacatttccgcgccctgaagagagttttttcattgcctgccgataattatcctgcgctttgtcgagactttgaccaatcgcggacatgtcatcgatgaacaaacgcatcttgtcgtacagcttgctggcacgatcggcgatttgctgggcgttgcggctttgatgctcataacgccacaggttggcgatagtgcgcagcgccaccagcagcgtagtcgggctaaccagcatgatgttgtttttcaacgcttcggtgatcagctccggctggcggtcaagcgccagtaaaaaagcgggttcaacgggaataaacatcagcacgtaatccagagttcgcagccccggcagctgttgataatctttgcgtcccagcaaacggatatggttacgcaccgacgcgatatgttcctgtagcgcgctttcgcgggtgtagtcgtcttcggcgttaaaatagcgttcataggcgaccagcgtcattttggcgtcgatcaccacatcttttccctgcggcaggcgcacgatgacatccggctgcatccgcgagcgggcgtcattttcgatgctgacctgggtttcatattcatacccttcacgcagaccggaagcctccagcacccgcgtcaatactacctcgccccagttgccctgggttttattgtcgcctttcagcgcgcgcgtcaggttgatcgcttcctgggccatttgcgcgttgagttgctggagattgcgaatttcgtgggtcagggtatggcgttcttgtgcttctttaccgaagctgtcctgaacctgacggcggaaaccgtccagttgttcacgtagcggcgacaacaggctgttcagactctgacggttttgctcatcaacccggcgattgctgtgctcaaaaatacggttggcgaggttttcaaactgctcactgaggcgctgctcgctgttaatcatctggcgaattttatcgtcagcatgttgctgtgcggcttccatccgcgtggttacttcacgcagatcggcctccagagaggtgttaatactttgcaggctgcgcacttcgttattgagtaactcgcactctgcacgccagtgctcgctttgggtaatttgttgttttgccgcgcttaactccgcgaccatctcttcacgttcagctaattgctcggctttttgctgcgcatgttgataactggcaaacagccagccaattgccacacccaccaacgcaataactgcgtaaaccatgattgagaaatccacaacgcctcctgacgcaacaacttacccgcacaaaatagaattgtgctgtacaaacgtccagttggaaaggcatttcctgcgaggcgctacgcaaaaatacaaaaggccgaacgcgtcggccttcagacaggagaagagaattacagcagacgacgcgccgcttccaccacgattttcaccgcatggctttcggtttgtttcatcgtctcagcattcgggatctcttgctgggtgcggttaacgataacacccgctaccataccggcacgcaggccctgacttgcacacatggtcagcagggttgcagattccatttcatagttcattacgcccatcgcctgccactcttccatagaacctttaaagtgacgaactacgcgaccagagtaagtatcgtaacgttcctgacctgggtagaaggtatcagaagaagctgtcacgccaacgtgagttgtcgcgccaatggatttcgcagcttcaaccagcgcagtcgtacattcgaaatcagcgacagccgggaattccagcggtgcgaagtgcaggctcgcgccatccagacggacagacgccgtggtaaccaggacatcacccacattaatatgcggctgaatagcgcccgttgtaccgatacgcaggaaggtgcgaatgcccagctgtgccagctcttcaacagcaatagaggtagacgggccgccgataccggtagagcagacgataacaggtttaccatccagctctgcacgccaggtagtgaattcgcggtgagatgccagcttaaccggcttatccatcagcgcggcgatcttttccacacgatccgggtcgccagggacgatggcaagcgtagccccttgtaaatcgtttttagtgaggccgagatgaaaaacatcagacttggacatatacaactcctctgtgaatcggtttagtcagaagaagcaaaaagacactttaccgaagggtttaacattttttcgtgatactcatcaccatgacgcaaatgcgttgcataaatttacccaccaaaagtgatgcaaatcacataaatcacccttcattctgcaggactgcataaaagatgagccgattcaggcaatgtgatttgttgcatgctgactatagttaacattgcgcaacatttttataagggtacggagaataccatggcaacaacacaacaatctggatttgcacctgctgcatcgcctctcgcttcgaccatcgttcagaccccggacgacgcgattgtggcgggcttcacctctatcccttcacaaggggataacatgcctgcttaccatgccagaccaaagcaaagcgatggcccactgccagtggtcattgtagtgcaggaaatttttggcgtgcatgaacatatccgcgacatttgtcgccgtctggcgctggaggggtatctggctatcgcacctgaactttacttccgcgaaggcgatccgaatgattttgccgatatccccacgttgcttagcggtctggtagcaaaagtgcctgactcgcaggtgctggccgatctcgatcatgtcgccagttgggcttcccgcaacggcggcgatgttcatcgtttaatgatcaccggattctgctggggtggacgtatcacctggctgtatgccgcgcataatccacagctaaaagccgcagtggcgtggtacggcaaactgacgggcgacaagtcgctgaattcaccgaaacaacctgttgatatcgcaaccgatcttaacgcgccgattctcggcttatatggtggtcaggataacagcattccgcaggagagcgttgaaaccatgcgccaggcgctgcgggctgctaatgcgaaagcagagattatcgtgtacccggacgccgggcatgcattcaacgctgattatcgcccgagctatcatgccgcatctgcagaagatggctggcagcgtatgctggaatggtttaagcagtatggtgggaagaagtcgctgtaatgagaaaagaccgggtggtattaccacccggtttggattttacccccgacgcaagttctgcgccgcctgcaccatgttcgccagtgccgcgcgggtttctggccagccgcgcgttttcaggccacagtccgggttgacccacaggcgctctgccggaatgcgttttgccgctttcttcagcaaggcttcaatccattccacgctcggtacgtttggcgagtgaatgtcatagacgccaggaccgatttcatttggataatcaaactcttcaaacgactccagcaactccatgtcggaacgcgaggtttcgatggtgatgacgtctgcgtccagcgccgcaatcgaatccatgatgtcgttgaactcgcaataacacatgtgagtgtggatttgtgtgtcatctttcgccacggcggcgttgatacggaaggcctctacgccccactggagatacgcatcccagtcgctacgacgcagcggtaaaccttcgcgcagcgccggttcgtcaatctggatgatgccaattccagcggcttccagatcggccacttcatcacgcagcgccagcgcaatctgtttggcgatggtttcacggctgacatcttcacgcgggaacgaccagcagagtatggtcaccggccccgtcagcatccctttcaccggtttgtcggtcagcgattgcgcatacttcgcccactccacggtaatcggtgccgggcggctaatgtcaccaatgacaatcggtggcttcacgcagcgggaaccgtagctctgtacccaaccgttttgcgtaaagacaaatccgtcgaggtgctcgccaaagtattccaccatgtcattacgctcggcctcgccatgtaccagcacatccagtcccaaacgttcctgctcaacaatggcctgcttgatatgttccgcaatgcccgtgcggtagttgttggcgtcgagattgccctttttgaaatccagacgcagggtacgaatttccgtggtttgcgggaaggaaccaatcgtggtggtcggccacgctggcagtttaaaacgcgcacgctgggcttcagcacgcacttcatagacattcgcacgctggctgtcctgggcggtgatcgccgccagacgcttttctaccgccggattatgtacgcgggtagagtgacgacgtgcctgaatcggggcgctccactctgccagagctgccgtgtcaccactgttcagcgcatcgcgcagcagtgccagttcatggcatttttgtagggcgaaggcaaaccagcttttcacttctgcatcaagacgcgtttccacgctcaggtcgatggggctgtgcagcaacgagcaggaagatgccacccacaaatcacgtttgccgacaatgtccttaatttgcgcatatttctcggtaagatcggcgcgccagacgttacgaccattgatcagacccgcagacagcaaccagtcagaaggcaggcgcttgtgcagttcagcaacgtcatctttaccatgtacgaggtcaacatgcagaccctgaacaggcagcgcagtaatcgtgtcgagatttggcgttacgccttcaaaataggtggtcagcagcagtttcacctgtccctggagcgcgtcgtaagcgggtttgtatgcgtccagccacgcctgtggtagttccagtaccagcgcgggttcatcaatctgtacccactcgatgccgcgtttcgccagttctgccagcacttgctgataaaccggcagaatgtcgttcagcaggctcaggcggtcaaattgttcacctttcactttccccagccacagccaggtaaccggccccagcagcacaggtttcaccttgtggcccagcgccagcgcctcgtccacttcgtccagcagctgcgtccaggtcagtttgaactgttggcctttaacgaactccggcaccatgtagtgatagttggtgttaaaccatttggtcatttccgctgccgccgcaggttcgccagtcggcgcacgtccacgaccaatacggaacagggtgtcgatatctaccgaaccatctttgttctgatgacgcgccggaacgttacccagcagcagactggtggtcagtacatgatcgtaccaggcaaaatcgcccaccggcagcaggtcgatacccgcttgcttttgttgatcccagtgacgagcacgcaattcacgccctaccgccagcagttcttcacgcgtggagttccccgcccaataactttcttgcgcttttttcagctcgcgacgcaggccaacgcgagggaaaccgagggtgtgattcaatattgtcattttttcttcctctaattatatgtaaatcctatggattttgaatttagggaaggcggcaagtttattcatccccgggagcttactgaagtaagtgaccggggtggagaaacgcagccaacgcaccataaatttaaaagacgaaggattttagccgtccagatgtttacacatccataattggcggttactgtatattcctcaagcgcaaattattcatgccgaagtgaaggactttcatgatcgaagtaaaacacctgaaaacgctacaagcgttgcggaactgcggctcgctcgcagccgctgcggcgacgttgcatcagacgcaatccgccctgtctcaccagtttagcgatctggaacaacgccttggcttccggctatttgtgcgtaagagccagccgctacgctttacaccgcagggagaaatcctgttgcaactggcaaaccaggtactgccgcaaattagccaggccctgcaagcctgcaatgaaccgcagcagacgcgtctgcgcattgccattgagtgccatagctgtattcagtggctgacacccgcgttagaaaatttccataagaactggccgcaggtagagatggattttaaatcgggcgtgacatttgacccgcagcccgccttgcaacagggagagctggatctggtaatgacgtccgatattctgccgcgcagtggcctgcattattcgccgatgttcgactatgaagtgcgtctggtgttagcacctgaccatccactggcggcgaaaacgcgaattacaccggaagatctcgccagcgagacgctattaatttatccggtgcagcgtagtcgactggatgtctggcggcattttcttcagccggcaggcgtcagcccgtcactgaaaagcgtcgataacaccttattgttgattcagatggttgccgcgcggatgggtattgccgcgctaccgcattgggtagtagagagttttgagcgccagggtctggtggtgaccaaaaccctgggcgaaggcttgtggagccgactgtacgccgccgtgcgcgatggcgagcagcgtcagccagttacggaagcgtttattcgctcagcgcgcaatcacgcctgcgatcatctgccgtttgtgaagagcgcggagcgacccacttacgatgcacccacagtgaggccaggatcaccagcgcgcctgtaataaacgttggccagtgcggctgttggtgccagatagccaggtttaccagcagccctgccggaacgtgcatattattcataatgcccagcgttccggcgtccacctgcgtcgcgccgtagttccacataaagtagccaatcccggaagccaccacgccaagaaacaccagaatgccccattgcagcgtggtttgcggcattttctgcgcatttcccagcaagaaccatgcaatcactgccaccagaaacgcgccaagatagaaccacgcaaaggcgttatgctgtggcatcgggcgagtttccatcaggcgtttgtaacccaccatgccaatggcaaaagtgatattggagagttgcaccagcagcaagccagtccagaaatggtcggtgacctgatcatagcgaataatcccggcaccaatcaccgccagcaaggcgctaaaggcatagccccagcgcagacggcgcttactcatgatgtcataaatcagcgtgatgtagagcggcgtcagcacggtgaacagcagcagctcggaaaccgtcaggtagagataagcgcggaaactcagcatatacatcacgccaagctgcatcgcgcccaccagcatatacaggccgaccgttttcaggctattgccacgggtacgcagaaacggcagaaaaacgagtgccgccaggccaacgcgcaccagcaccgcaaaatagctatcgacgtgccccgcaaggtactcgccataaaagctaaaggagaaggcccacagaatcgtggtgatgataagtagcgccacaatggaaaactctttgattaacgggtatccattgtagcgaagtatcaggttgacaactgaccaaataaagaacgattacgataaatagagtttacgcagataatgcggcaccgcgtcgtcggcattagtaccaatcacttccagctcgggatgaaggtctttcagacgctggtgcgcactgcccataatgcagcctttccccgccatcgacagcatttcggcgtcgttcatcccgtcaccaaacgcaatacaatccttcaggctgtagcccagtttcttcgccaccgcttccagcgcatggccttttgaaacgccgcccgccatcacttccagacaggttaaggtagagaaactgacgttgacgcgatcgccccaacgagcgttaatcgcctgctccagcggcagcagttgttcatgggaatcgcaggtgaagaacactttgctgacgccttccggctccagtaatccaggctcatacagcgcatattggaacaccgcttctttaaaaaagcgcatctcttccgggcgatggcgattcataaaccattcgtcgtcgcgataaacgttagtaatgatgtccggattgtcgttgactacgccaaacagatcgctggcaatgtcgcgatccaggttatgagcaaaaatcagattaccatccagatcgtgaacgcgcgcaccattggaggtaatcatgtaagacttaatctccagattatcgcgaatttgccccacatcaacgtggtgacgaccggtcgcaaacacaaagttgatgccgcgcgcggtgagcagcttcagagtttctttggcgtaaggggataacgtatggtcgggagaaagtaacgtgccatctaaatcagacgcaacaacctggtacataagaaatttaaacctctgtagagcggtttccgctgggtgagttatgcctgttgaaaaaatcaacgatggcgtggagcgcgactgagcgcattgcgtccttttcaaaaaggatctcatggtaagcacctttaattaccaacggccgtcctccttcgacaggatggcccgcggcggtgcggagttcacaaaaacggtcatgcatgcggttatccaccacgcgttcctcttcagcctgcaagagaagcgttggcgtggcgtcatcacccgcaccggctaacacctgttcgccagccagaatactttcgcgtacccaatggtaggtcggcccaccgacgcgaatcgttgggtcatcagcatagaagcgtaagttacgtcgatatcgctgtctgctgtgggtcagtacgttgatagcaaacggcaacgcgcgccagcgcccggtgcctattgcatagccatcacggaaacgtggatgcgcttcggcccagttgaggatctgccgtgccataaatgacggcatacgaatcacgatcccaaacattggcgcagttagcgcaatggcgtcacatacacctggatggcgttgcagaaataatgtggagatcgcaccgcccatcgaatgtgccagtatatagcgtttacgccacggaccgggctgaacctcctgctgccagaatgccgccagatcatcaacataatcattaaagcgattaacatgcccgagatgcggatcggctaacaggcgaccggaacgtccctgcccgcgatggtcgatgattaagacatcaaaccccaaatggaacaggtcataggccagttccgcatattttacgtagctctcaatacgccccgggcagatgactaccacccggtcatggtgctgtgcgcgaaaacggacaaagcgcaccggaatgtcatccacaccagtaaactctgcttcatcacgctgacgccagaaatcagtcagcggtcccatggtaaaagcagcaaacgcgttttctcttgtttcccagtctttttgctgctgaaacatcgggtaatctgcctcttaaaccacgtaaaatcgttttttttagcgtgcctgacacaacgctgcgacagtagcgtattgtggcacaaaaatagacacaccgggagttcatcatgaccttagaatggtggtttgcctacctgctgacatcgatcattttaagcctgtcgccaggctctggtgcaatcaacactatgaccacctcgctcaaccacggttatcgcggcgcggtggcgtctattgctgggcttcagaccggactggcgattcatattgtgctggttggcgtggggttggggacgctattttcccgctcagtgattgcgtttgaagtgttgaagtgggcaggcgcggcttacttgatttggctgggaatccagcagtggcgcgccgctggtgcaattgaccttaaatcgctggcctctactcaatcgcgtcgacatttgttccagcgcgcagtttttgtgaatctcaccaatcccaaaagtattgtgtttctggcggcgctatttccgcaattcatcatgccgcaacagccgcaactgatgcagtatatcgtgctcggcgtcaccactattgtggtcgatattattgtgatgatcggttacgccacccttgctcaacggattgctctatggattaaaggaccaaagcagatgaaggcgctgaataagattttcggctcgttgtttatgctggtgggagcgctgttagcatcggcgaggcatgcgtgaaaaataatgtcggatgcggcgtaaacgccttatccgacttactctgaagacgcgtctggcatcaccgcgaaataatcaaatgaatgccaaatccggcaaataacgccccggcaaaaccatcaatccacttcgccagacgttgataaccacggcgcatttgcggcagggcaaacaggctggcaacgacggtaaaccacgccagcgtttcgacaatgatcagcgcaaaaatgccccagcgcgcggtagtgccaacgttatcaccgacaaacaatgagaacaccgagccaaagtagataatcgctttcggattagcgagattggtcagtaaacctttcaggaaactgcgcccacttttcgccagctcgacctgtggcgcaggtgcagaaaccgcctcttttttcagtgcaccacgtagcatctggtaacccatccagcagagatacaggccaccgcccaccataatcagcgtatgcagccaggccattttttcgataatcaaatgcaggccaagcagcgcaatcccagcccaaaccattacgccgcaggtaatgcccagcacgcccatcatcgcttctttacgggaacgactgacagcggtctgagagacaaaaaagaaatcgggaccggggctcataagcgccacaatgtgcaccatggcgacggtgagaaataacatcaacatacatttgactcgcgggggaaacgtttacggagtcttcatactggcacttttttatgctgctgactactcttcgtcatcgccatcaacatgcgcacgaatcagcgccataaacggtttgccaaagcgttccagcttgcgcatcccaacgccgttaacgctgagcatttcgctggcggtgatcggcatctgttcagccatctcaatcaaggttgcgtcgttaaacaccacgtacggcgggacattactttcatcggctatcgatttacgcagtttgcgtaatttggcgaacagtttgcgatcatagttgccgccgaacgatttctgcatcgctttcggtttgagcgccacgatacgcggcacggcaagttgcaaagaggattcgccgcgcagcaccgggcgcgcggcctctgtcagttgtagggcagaatgctgggcaatattttgcgtcaccaggccgaggtgaatcagctggcggatcacgctcacccaatgttcatggcttttatcacggcccatgccatagactttcagtttgtcatgaccatagtcgcggatacgctggttattagcaccacgaatcacttccaccacataacccatcccaaaccgctgattcacacgaccaatggtggaaagggcaatctgagcatcggttgaaccgtcgtactgtttcggcggatcgaggcagatatcgcagttcccgcacggctcctgacgcccttcgccaaaatagttcagcaataccagacgacggcaagtttgcgcttcggcaaacgcgcccatcgcattgagtttgtggcgctcgatatcctgcaactgcccctgcggcttctcttccagacaacggcgcagccacgccatatcagccggatcgtaaaacagcatcgcttccgcgggcaggccatcacgcccggcgcgtccggtttcctgataataggattcgatattgcgcggaatatcaaagtggaccacgaagcgaacgtttggtttattgatgcccatgccgaacgccaccgtcgccaccacaatttgcaggtcatcgcgctggaatttttcctgcacatcggcgcgaacattattttccagcccggcatgataggccgccgcgctaattcccttgctttgcaggcgcgcagcggtgtcttctactttcgcgcggctgttgcagtagataatgcctgacttaccgcgctgttcctgcacgtagcgcatcaactgatcgagcggtttgaacttctccatcagcatgtagcgaatattcggacggtcaaaactgctgatttgaatcagcggatcgttcagccccagcaggcgcacgatatcctggcgcgtggtgtcgtcggctgtggcggtcagcgccataaacggcagcgtcgggaaccgctggcgcaactgaccgagcgcggcatattccgggcggaaatcgtggccccattgggagatacagtgcgcttcatcaacggctaataacaccggattccagtgcgccagatgctcaagaaagttatccagcatcaggcgttccggggcgatataaagcagacgaatttgcccggtgcggcagcctgtcatcacttcaagttgctgttcgcgggtttgcgtcgagttaaggcacgccgccgccacgccgttggcttgcagttgatccacctgatctttcatcaacgaaatcagcggtgaaacaaccacggtaaggccgtttagcaataaggcagggatttgatagcaaagggattttccgccaccagtgggcatgacgacgaggcaatcgcggccggaaagcacagtgtcgataatttcttcctggccggggcgaaactgttggtagccaaaggtttcttgtaaaacctgtttagctccggactccagattcaacacttccgcctgcgccacattcaccccgattgcctgaaataaaaacaggcgctattttcagcgcctgcgcgagaaactgcaatgcttttagtctctgagagggtaatcctggatgctggattccagatttgccaaccactcaaccgttcatcaaaacaaatcgtttagcataacccccacaccgacacgggtctggttgaagttatagtcgatgagcgattcgccatagccgctgtaaacctgagtataaaggcgcacatgtttggtgatcgggtaacttaagcctaactccgcgccgccgtagccggtgttccagttgtactgtcctttcgcactgagcaccgcatcaccgaggtgatagccgattttaagctggtagtaacccatatatttggtgatatccgggttatcgtcagtattacccaccacataccacggcttcacttctaccagccagttaccgttttctgccatcaggcgagtataaaggcggttccagctgcgggaggtcgggtcggaacgcccgttagagtcgtggttataccccatctccacatcgcgcagcgtccaacctgcaaaacggtaatcggtggcaaaaccgaggaacaattgcggttcgtagttggtttcacgaaacggtgaagactcttcgctattggacagttgccaccaggatttttgcgtataagacgcacccaacaccgagttcgggcctaaaatcccacgccacagcggaaatgccaggctcaactgaaactttacttcatccttacgcgcattttccgcccagtcgtaactggcaatcgcttctttattcagatcgctggtttgggtgtaaatgaggtagttggtgtcataaggatagagcgtgaacggattgtcatgctcctgcagcatattggcgataatactgccacgcaccgctggcgcgtcatgcacctctttcaccgttgcctcttgtgcatatactgccataggcaacataaacaccggcaacaaccagccctgcagagtccgcatcggtcgtgttctccgtaacgaattattgataaggtgaatatttttctgcgggctattttacatacttaactccatagccgttagttatcccttcctaaagtagaaaccaacaacaaagaagcataaaatcaacatttcattaaccaatgaagtgtaaggatgatatgtctgccgtactgaccgctgaacaagccctgaaattagtgggtgagatgtttgtttatcacatgccatttaaccgcgcattggggatggaactggagcgttacgaaaaagagttcgcacagctggcctttaaaaatcagccaatgatggtgggcaactgggcgcaaagcattttgcacggcggggtcattgcgtcggcgctggatgtcgccgccggtctggtgtgcgtgggaagtaccttaacccgccacgaaaccatcagtgaagatgaactacgccagcggctatcgcggatggggaccattgatcttcgcgttgattatctgcgcccaggcaggggcgagcgttttactgctactagtagcctgttgcgtgcaggcaataaagtcgccgtcgcccgcgttgaattacacaatgaagaacagctttatattgccagtgccaccgccacctatatggtaggttgaagacataaaagcaggtaaactgctgttaccaattaaaaatgagtattcccgatggatgcaaaacaaacgcggcagggcgtattactcgctcttgccgcttattttatttggggtatagcgccagcgtacttcaagttgatttactacgtgcccgccgatgaaatcctgacgcatcgcgtgatctggtcgtttttctttatggtggtgctgatgagcatttgccgccagtggtcctatttaaaaacgctgattcagacgccacagaaaatttttatgctggcagtctctgccgtgctgattggtggcaactggctactgtttatctgggcggtgaacaatcaccatatgctggaagcgagccttggttactttattaacccgctggtgaacattgtgctggggatgattttcctcggcgagcgattccgccggatgcaatggctggcggtgattctggcgatatgtggcgtgttagtccagctgtggacttttggttcgctacctattatcgcgctgggactggcatttagttttgccttctacggtctggtacgcaagaagattgccgttgaagcgcaaaccggcatgttaatcgaaaccatgtggctgctgcccgtggcggcaatttacctgtttgctattgccgacagctcaaccagccatatggggcaaaacccgatgtcgctgaatttactgctgatcgccgccggtattgtcactaccgtaccgctgttgtgttttaccgccgctgccacgcgcttgcgtctctcaacgttaggctttttccagtacattggcccgacgctgatgttcctgctggctgtgacgttttatggtgaaaaaccgggtgccgataagatggtgactttcgcctttatttgggtggcgctggcaatttttgtgatggatgcgatttatacgcagcgtagaacgtccaaataaaaaataaatatattctgaaaaaatatgccgactcttgcatgagagtgggcatattgccatgctgaccggagactcatacaaggatgtaaaatttatgttacgtatatttatcccaacatctaacggtaagatttccagacgtcgttatatattttcatttattttaataaatttcatttttgcctttcttattatcttttttaacgatggagaagcaggctttcttgttatagtctctaccatcgtactccattatctcgtcatcaacatgaattgccagcgactccgtgatagtggtttcatctatataaaaacttatgtttttggtacattagcagtatatatcatctctatcatcacaatgatagccgaagattttgcctgttcaggcaatggttcgatgatttttttgatttgttatttttccactttcagtatgctaatgcttgcacctactgattcatcaaaacaatagttatggagtatttatgagtaaggaatatatgaacgatggttcattaagtgaaaaatggaaataccgatttaatttttatgatcaacatggttttcctggattctggggggcaacaccagaatataaagcagcatttaaagcattaaaagtaagacaacgcttaactattcaaatgaatttcattgctttcttctgttcctggatatatttatttgtcctggggttatggaaaaaagcaattatagttctattacttggtattctatctctatttgttggtgcactaattggcgttaacattctgggaattgccgtagcagcctatgttgctgttaacacgaacaaatggttctatgagaaagaggtaaaagggttaaatacctggagcctttgaataacaggtggcttagccagactaagccaccgctctcgttttttacaaccagttcttccgcttaaagtacagatacggtgccaggcccgcgaggatcataaagataatcgcgccagggtagccgaagctccacttcagttctggcataaactcaaagttcatgccatagctggaagcaacgagcgtcggcggcaggaataccacggataccaccgagaagattttgatgatgcggttctgctcgatgttgataaaacccattgccgcctgcatcaggaagttcaccttctggaacagggattcgttatgcggcagcagggattcgatatctcgcaggatttcacgcgcctgctccagttgcccacccggtaaacgcgctttacgcaccaggaagttgagcgcgcgctgggtatccatcagacacaggcgaactttccagccgatatcttccagttccgccagagtggagagcgcctcgtcgtactcatcgccctgatgcccttccataatcacccggctcaactgctccaggtcgctatagatattttcaatttcatctgccaactgttcgattttggtttcgaacagatccagcagcaactcgtaggcgttaccgtctaccatcgactggctacgggcacgcatacgatacagacgaaaagcgggcagttcacgctcacgcagagtaaacagacgaccatcacggatggtaaatgccacagtggagttaccggcgtgatcttccgcatcttcaaagaagaagaaggagtgaatatgcaggccgtcgtcgtcttcaaagaaacgtgccgatgcttcgatgtcttccagttccgggcgggttgccaggctctggccaagttcagattgtacgcgcagtcgctcgtcgtcgtccggttcgacaagatcaatccatactgcatttacaaggggttgtgactcttcgacttccagccgggtcagtcggttattttccagttgaaatgcgctcagcatgaccgggactcccaatgcttaaaatatcggacagttcggtgggcacacagaaacaaattgggtttcagaccattaaacagcctgactcagcgcgacgggaaaaattgaggtcgctgacaaccgctaaggctatcagcaaaaagggatagccttaggagttgatcctggatgacaggatagtgagccagtatctactgggtgtgtccaaggcgaatgtcctcttagagtgatcgtgcgcgcatgttacgccagcaaaattttgccgtcaacacgcaacagaacaccacagaacaatagttgaacttcgcgctttttggtactcgtcaaggtcgctaacaggataaaaaaatcccacatccaggacctataatggcgcatcagctactcattggtaaaggaatgatcaccttgaatctcaaacggatttttctcgccctcaccttacttcccttgtttgctgttgccgctgatgattgcgcactctcagatccgacgctgaccgtacaggcgtataccgttaatcctcaaacagagcgggtgaaaatgtactggcaaaaagccaatggcgaagcgtggggaacgttacatgctctgctggcggatattaatagtcagggtcaggtgcagatggcgatgaacggcggcatctatgatgaaagctatgcgccgctcggtttgtacatcgaaaacggtcagcagaaggtggcgttaaatctcgcttcaggtgaagggaatttctttatccgtcctggcggcgtgttttatgtcgcgggagataaagtcggcatcgttcgtctggatgccttcaaaaccagtaaagagattcagtttgcggtgcagtcagggccaatgttgatggaaaacggtgtaattaatccgcgtattcatcccaacgtcgcctcaagcaaaattcgtaacggtgttgggattaataaacatgggaacgccgtgtttttgttgagccagcaggcaacaaatttttatgattttgcctgttatgccaaagcgaaactgaacgttgagcagctgctttatcttgatggcacgatttcacatatgtatatgaaaggcggggcaatcccgtggcaacgctatccttttgtcaccatgatttccgtcgagcggaaaggttaaaacgatagttttgtgtcagatactgaagatggcgcagatgccggatgcggcgtaaacgccctatccggcctacatgacgttgcaatttattgaatctgaatgattttttaggccaaataaggtgcgcagcaccgcatccggcaacgttacaccgactccagccgggcgtatgccgccaccagccatttaataccctggccctgaaatgccacctgcaaacggctatgctcaccgctgccttccatattgacaatggtgccttcaccaaacttagcgtggcgtacgcgctggccgagcttgtagccgctgtcgttctcgaccatcggcgtacccatccgctgatggctgaccgggcggcttaccgtggcgcgcaggcgcacctcttccacacactcttccggcagctcgccgataaagcgcgacgggcgatggtaaacctctttaccatacagacggcgggtttccgcgtaggtcagcgtcagtttctgcatcgcgcgggttacgccaacgtaggccagacggcgttcttcttccagacgcccgccttcatccagcgacatctggcttgggaacatgccctcttccataccaacgataaacacctgcgggaactccaggcctttcgccgagtgtagcgtcatcaactgcaccgcatcctgccaggtatccgcctgcccttcacctgcttccagtgccgcatgggagaggaacgcctgcagcggcattaaatcttcgtcttcttcgttgtagctgaactggcgcgttgccgtcaccagttcctctaagttttcgatacgcgtctgacctttttcgcccttctcctgctcatacatggtacgcaggccggagtctttaattacccggtcagtctgtacatgcagcggcatatcggcagtttcctgcgctaaggcgtcgattaattccataaatcgctgcaaggcgctggcagctcgcccggcgagggctttttcctgcaacagctcacgacatgcctgccagagtgttaactggcgatcgcgcgatgtctgacgtaccacgtccagcgtccggtcaccaataccccgcgttggcgtattcaccacacgctcaaaggccgcgtcgtcgttgcggttggcaatcaggcgcagatacgagagcgcatctttgatttcctggcgttcgaagaagcgcatcccgccgtaaatacggtacggcatactggcctgcaataacgcctcttcgagcacccgcgactgggcgttgctgcggtagagaatggcgcactcggcaagcgctccgccgttgtcctgccaggttttgatgcggttaaccacaaaacgcgcttcatcgagttcgttaaaagcgcaatagagggaaataggctcaccgtccgcgccatcggtccacagttttttacccagacgcccgttattgttttcaatcagggcgttagcggcgctcagaatattgctggtagagcggtagttttgctccagacgaatagtttcggcaccggggaaatcattaaggaaacgctgaatattctccacctgcgccccgcgccagccgtagattgactggtcgtcatcaccgacgatcatcactttgccggtgtcgcccgccagcaggcggatccacgcgtactgaatgttgttggtatcctggaattcgtccaccaggatattggtaaaacgttcgcggtagtgttgcaggatatgcggcttgttaagccacaactcgtgagcgcgcagcagcagctcggcgaagtccaccaggcccgcgcggtcacacgcttcctgatacgcctgatacaccttctgccaggtctgctccaccggattaccgtagctttgaatatgatgcggacgcaggccttcatctttctggctgttgatgtaccacattgcctgccgcggcggccactgcttctcgtcgaggttcatggctttgatcagacgcttaagcaggcgtagctggtcttcactgtcgaggatctggaaatcctgcggcagattggcgtccatatggtgcgcacgcagcaaacggtgcgccagcccgtggaaggtgccgacccacataccgccctggctcgtgcccatcagttgcccgatacgatgacgcatctccgccgccgctttgttggtaaacgtcaccgccataatcgagtatggcgagcagttttccacgctcatcaaccaggcgatacgatgcaccagtacgcgcgtcttaccactgcccgcgcccgccagcaccagaaggttgctgcgtggcgcggccaccgcttcgcgctgtttgtcattaaggctgtcgagcaggtaagaaacgtccattggcaccgccgcgtaaaaataggttgggcggagaagcgcaacgccctccgccaaaaagctgggtatatatacagatttgctgattatatcagcgaggtcagagatgccaaccgggaaatttccagatgcggcagtaaacggctgtcccaggtttgcatcagatcgccattttccggtctgatccaacaagcctgcattccgctgcgaattgccccacccacgtcagtggtgagatcgtccccaacatgtaagatctcgccgatcggcacgttgagtttttccgcagccaaaaagtacatatcgctgaacggttttgagcgcccgtgcgggccagcgcgcagcacaaactcaaaataatcccccaaaccaaacagctccggctgggcgttaccgttggtgatcgccaccagcggccatttcttcgccagctgttttaaggtgtcgtgagtttgctgcgggacgtcgattcggctgcgccatttggcaaagttgatcattgctgcgtgtgcgcctgcactggcttcttcggcactcagcccggcgtcgagcatcgcttgttcaatcgaacgaaaacgccagcgcgtcacgtcgtgataaatctcgggttccgcttcccgtaccgcctggcgcaggcgttgcagatcttcattctggaagctgcgcagcgccggatgataattttgcacaaaggtaagcgcctctcgctcggtgcgcaaaatcaccggacggttatcgtaaagggtatcatccaggtcaaaggtgagcgccgagatgcgccccaaaggccggtaaaaacgcattatttcccccgtttggcgcgtggatgcgccgcatcgtacaccgaggcaaggtgttgaaaatcaagatgagtatagatttgcgtggtggagaggttggcatgacccagcagctcctgcacaccacgaagatcgccgctcgactccagcatatgcgtggcgaacgagtgacgtaatttatgcggatgaacgtgattattcagcccttgttttatgccccattcggcaaagcgtttctgcacattacgcgcggagatacgcttgcccagtttcgacagaaaaagcgcgtcgtcttcgctaccaaacaggtcgcgcaaatcaagccagtgctcaatccacgccacagcgttgcgaccaatcggcaggcggcgctctttgctgcctttccccataacccacacttcaccagactccaggtcgaggtgtttaatatccagccccaccagctcagaaagacgcagacccgcgccgtacatcacttccagcattgcacggtcgcgtacagcgaggggatcattgatatcaatatccagcagccgattcatatcgtcgacgtcgatgtttttcggcagatgacgcggcgctttcggtgccgaaacacctttcgccgggttagctttgagttcgttctggctgaccagccagtcaaaaaagctacgtagcgcagaaagccgtaacgccagacttgctgctcccagccctttacggcgactgcgtacagcaaaattgcgcaccatcgtcacatcacattgctgccagctttgcaggccgttttcgctggcaaaattgatgatcgcctcaagctgacgctggtagttaagcagggttatcgggctaagctggcgctccacgctcagataacgtaggtagcgttctacatcggtgtgtaaatcggtcatacgcgttcaatccaacgctccagaagctccggcaacatcagcgcaatttcatgaagtaactgcgttccttgcccttgttgatagtgactggcatcgcgactggtaaacagcacgacacccaaatcagcatcgcttcccagcatcgacatcgccaccgatcccaccgctttcgcttccggtagcaccaccagcagctctggtccgttaagcggcccaagatagtgctgttcctgccccaaacgctgaatacgcagcggttcgaaagactgacggcttaatgccagatgagtgtggttcgacggcgcacctaagcgccagcgatccggaaacaggcgcagactcgcacctgccaggccgagatcgcgcgcccagcggtgaaagcgcatcagcatatcgtcgagactgctggcggcggtgagactgcgctgcaggtagagtaggcgataaaacaggccttcgttggcgatagcctgttccatcaacagcgccatgttctcttccagaacatgaatatgattacgtgcgcgggccatgtgccactcgaccaacgaaacggtgccgcgtaccggatgcggcacacgtatcgcttctactgcgcgcgcattacggataaaaaactcaggatttttaatcagataatcgacaaccgcccggtcatcaagctccgtgagtgtttcctgcagttcttcccctggttgcttcatagatgaataaatccgtcgtagacatgtaccgccgggccagtcatatataacgggtgacccggacctttccaggcgatatcaagacgaccgccggggagttccacgcgtacttcttcggccagcaaaccttgctgaatccctactgcaaccgccgcacacgcgccgctgccgcaggcctgggtttctcctgccccacgctcataaacgcgtaaacgaatatgctcgcgcttaaccacttgcataaaaccgatattggcgcgctccggaaaacgctcgtggctttccagaacaggaccaagcgtttctaccgccgcggtatcgacatcatcgacctgaatcacgcaatgcggatttcccatcgacaccacgccgcataagattgtctgctcggcggcgcgcataatataggtcttttccgctttgttagcgcgaaacggcacggcggaaggttcgaagttgggttcgcccatatttacgcggaccagatcatcatcggtgacggtcagaaccatccgcccgttggcggtgctgacgcggatatcacgcttattggtcagtcctttcagacgcacaaaacgggcaaagcagcgcgcaccgttgccgcactgcgccacttcactgccatcagcattgaaaatgcgatagtgaaaatccagttcaggatcatacggcggctcaaccaccagcagttggtcaaaccctacccccaggtgccgatcagccaggcgacgaatcagctccggtgaaaaaaagacattctgcgttaccgcgtcgacgaccataaaatcgttgccaaggccatgcattttcgagaactgcatcatttactccaatcacgcgggtacagaaactgacttttagtaattcacctgggatggaccatcgccagtggcgcgatcgtttttatccggcaccgtggattgcgtttgcgtctctaccggtttggtcggcggcggtgcgtttttatctgcaggcgggaaatagagcggacctttcagaccgcagcccgtcaggctgaagagagtaagtaatacagtgagtgccttaaacacgtttttcattatggattgcctgtaaagttcatcgctttctgctttctatcatcgcaggagaagacgtaaaagcaagcgtttagcgactctttatgaagtctgaaaagtgaggaaatgctgcgagtataacgcttactcgtggggatttatgttttgctggtagtttcgtgatcggcacctcgcgccaggatggctttatgcactatcgcaatgtggtttgtttgttgtcttttttagttccgtcagcgtgaggatgctcgctcggtaaacctgatcataatgtttaccagaaacagggaaagacgtggtgtaactgcgccctaatgaagagacaaatctttcgctacacagagacatcattattccggtgacggatgaatcgtgccggaacgcagccgcagaggtgcaaactttgaagccctgaccccatgccgctatactgccgccatcacttaaaaacaggatacaacaatgaacgacagtgaatttcatcgcctggctgatcaactctggctgaccattgaagaacgcctggacgactgggatggcgacagcgatatcgactgcgaaatcaacggcggcgtactgaccattacctttgagaatggcagcaaaatcattatcaaccgccaggagccgctgcaccaggtatggctggcaaccaaacagggcggctaccattttgacctgaaaggcgatgagtggatttgtgatcgcagcggcgaaaccttctgggatttgctggaacaggcggcgacgcagcaggcgggtgaaacagtcagtttccgctaagattgcatgccggataagcctcgctttccggcacgttcatcacgaaaaatattgctgtaatagcggcgtatcgtgatcctgattggcaggcggcatgttaccgatagattttgtgcggaacggaatcacctgttcacgaccatcaaccttcacaatctgatagaactgcggcaggttgaagttgatgaagcttgagccgtaggtaaaacggtcatgcgatgacgagtagaagcgactgacgtcacgtaccagctcctctttgctgccttcgcagtggtgatatacctcaacccggttgctttcgtcgagaatgtagatattaaagccattctcgtcttgcgtttcttcgaaaaagaactggatgatcccttcgctggcaaagccgtccaccaccgccggtaatttgacgtgattggtttcaacctgcactgacaggccgtgcagtttgttatgcgaaatcgcgccataaaactcgatggcgttttccagtttctgtaccgatacattcaggcgttcgaagaacaacccccaggtttgaccagaaacgcgcagcgccttgaaacgcccggtttcctggcgggtgctggaaagacgcaattcaatacactcagaaaccagttgctgcacgcgagtacgaattaagccgcgcagatgctggctataacagaagacttccacgctatctggcggtgcggcgtcctgatgcattttgccgagaatagttttcagggcttcgatcatcgattgctcgccgttgaagtgcagcgtacgcacttcgttccacgagttgcggtacagcaggtcaacgctacctaccaggcaattttgattctcgccaaagctgaagacatccagcttacggaaatcgaaatgcaccacctgattgcggaacgccgctgtcgggtcatattccaggttaacgataatcgccagatggcggatctcacacgggctgtagagcgccttcggtgtcggtgcaggtaagcgcagcgggaaatggtgcgacacgtcggcgaccatctcctgcaacttaggcaaatcgacaatgccgttacctttaatatacaaacgggtgcgcgaggtcagcaggccgttaaaccatgcccacgccaccagtttattcaggtaacggttatattccagcggctgatggctgatgatcgactcaatatttggcgcgcggttatacagataccaacctgaacggttagcccggcccggcggcacataaataaaggtcagattcggttccgagagatcgggtgaaatctgcgggtttaccagcgtcactttacctggtaatgcttcaaacgcggcatacagcttacgcgtcagcacgccgatatcctgcggactggcggagacgctaaggttattgcgacgcgcaaagcggatcagattacggtagctctgcatcatcgcgtcgagcaactcgttgtgcgcctcacgcacctgatcaatcttccagttagcgcggttatcgagcattgccagacgagcttcgtcccaaccccactcgctcactaactggctcaacactgcgcgacgccagcctacgcaggcgcgttcacggctgagcttttcgcacacttttaaatagaagcagcgacgtactaaatccagacgggtaaaatcttcaatcgccgtcaggtattcagtaacacgctccagcatcatgcagtatggatcgagaccaaacgatacaatctcgccgtcgtgcaaacgctgtttgatatctttcgccagcagacgtgggttcgggtattcccaggaataggcttccagcagcagtgttttcagtaccgctttgtatggggaatcgatactcttgtagagctgccaaaggctggcaccaaagtactcttcagcagaaagcgagcttaagccaccgagatccagccattcatttggcgtcagcacgccctgcgcgtaaagcgtcatcacatagtcgtcgtaatgctcttcttcgtcgcacggcaccatattccacagaatacgcttaccggcgagacgcacggcggtacgataaaattcgtcaagcagcagtatatgctgggtggagccacaatcttcgccccccaggctgccgctttcattatgacggaagcggttttcatcaatcaggaagaagctgacttccacacccagcgaggcggcccagttttccagcaggctacatttacgttgtagcaattggcgctcttcgctatcgagccaggattgatgacagacccagatatccaggtcagaggaacaactttgccctacggacgaggtgctgcccatggtgtatacaccagtaattggaagctcacctttcggcggatcctgtactgacattccacgatacagttcaagctcgttcaggtagtggcgttgagtttcatcaggcgtgtaaaggcaaatgcctttgggaacgttaccatcaaggtaacccggcattagcggatggtgatagtgcaacaatgtcggcagtagactgtagacctgttggaatgcaggccccatagcagcaagcgcgcgatccacacgcaattgatttatggcatccagtctctgtttcagagtctcaatatagaggtacaagacgtatcgcctgatttgctacccgtcatgactgtgattccgccaacatcaacggtaacacgcggcattcgggatatttcgtatgtcaaaggtaaccgttaccacttttcgcgcctggtttttttagtttcacgacgaaaaaatggtctaaaacgtgatcaatttaacaccttgctgattgaccgtaaagaaagatgcgctacatacaagtgtagcaccgtttattctctgtaaattccttattacaacggcgtgaaacgcctgtcaggatccactgccagacctcattttacggtttgcgcaggcgtctacgtttcaccacaacactgacatcactctggcaaggatgttaggatggaccacggatgataatgacggtaacaagcatgttagacaatgttttaagaattgccacacgccaaagcccacttgcactctggcaggcacactatgtcaaagacaagttgatggcgagccatccgggcctggtcgttgaactggtaccgatggtgacgcgcggcgatgtgattcttgatacgccgctggcgaaagtaggcggaaaaggcttatttgtaaaagagctggaagtcgcgctcctcgaaaatcgcgccgatatcgccgtacactcaatgaaagatgtgccggttgaattcccgcaaggtctgggactggtcactatttgtgagcgtgaagatcctcgcgatgcctttgtgtccaataactatgacagtctggatgcgttaccggcaggcagtatcgtcgggacgtccagtttacgtcgccagtgccaactggctgaacgccgtccggatctgattatccgctccctgcgcggcaacgtcggcactcgcctgagcaaactggataacggcgaatacgatgccatcattcttgccgtagccggactaaaacgtttaggtctggagtcacgtattcgcgccgcgttgccacccgagatttctcttccggcggtaggacaaggtgcggtgggtattgaatgccgccttgatgattcacgcactcgcgagctgcttgccgcgctgaatcaccacgaaactgcactgcgcgttaccgcagaacgcgccatgaatacccgtctcgaaggcggatgtcaggtgccaattggtagctacgccgagcttattgatggcgaaatctggctgcgtgcgctggtcggcgcgccggacggttcgcagattattcgcggtgaacgccgcggtgcgccgcaagatgccgaacaaatggggatttcgctggcagaagagctactgaataacggcgcgcgcgagatcctcgctgaagtctataacggagacgccccggcatgagtatccttgtcacccgcccgtctcccgctggagaagagttagtgagccgtctgcgcacactggggcaggtggcctggcattttccgctgattgagttttctccgggtcaacaattaccgcaacttgctgatcaactggcagcgctgggggagagcgatctgttgtttgccctctcgcaacacgcggttgcttttgcccaatcacagctgcatcagcaagatcgtaaatggccccgactacctgattatttcgccattggacgcaccaccgcactggcactacataccgtaagtggacagaagattctctacccgcaggatcgggaaatcagcgaagtcttgctacaattacctgaattacaaaatattgcgggcaaacgtgcgctgatattacgtggcaatggtggtcgtgagctaattggggataccctgacggcgcgcggtgctgaggtcactttttgtgaatgttatcaacgatgcgcaatccattacgatggtgcagaagaagcgatgcgctggcaagcccgcgaggtgacgatggtcgttgttaccagcggtgaaatgttgcagcaactctggtcgctgatcccacaatggtatcgtgagcactggttactacactgtcgactattggtcgtcagtgagcgtttggcgaaactcgcccgggaactgggctggcaagacattaaggtcgccgataacgctgacaacgatgcgcttttacgggcattacaataactctcataacaggaagccataatgacggaacaagaaaaaacctccgccgtggttgaagagaccagggaggccgtggacaccacgtcacaacctgtcgcaacagaaaaaaagagtaagaacaataccgcattgattctcagcgcggtggctatcgctattgctctggcggcgggcatcggtttgtatggctggggtaaacaacaggccgtcaatcagaccgccaccagcgatgccctggctaaccaactgacggcattgcaaaaagcccaggagagccaaaaagccgagctggaaggcattattaagcaacaagctgcacaacttaagcaggcgaatcgtcagcaagaaacgctggcaaaacagttggatgaagtccaacaaaaggtcgccaccatttccggcagcgatgctaaaacctggctgctggctcaggccgattttctggtgaaactcgccggacggaagctgtggagcgatcaggacgtcacgaccgctgcagcgttgctgaaaagtgcagacgccagcctggcggatatgaatgacccgagtctgattaccgttcgtcgggcaattaccgatgatatcgccagcctttctgcagtatcgcaggtggattatgacggcatcatccttaagcttaatcagctttcaaatcaggtagataacctgcgtctggccgataatgacagcgatggttcgccgatggattcagacggtgaagagctttccagttccatcagcgaatggcgtatcaatctgcaaaaaagctggcagaactttatggacaacttcattacgattcgccgtcgtgatgacaccgccgtaccgctgttagcgccaaatcaggatatctatctgcgcgaaaatattcgctctcgcctgctggtcgcagcacaagctgtaccgcgtcaccaggaagagacttatcgccaggcgctggagaacgtctccacctgggtacgtgcttactacgatactgatgatgccaccaccaaagcgttcctcgacgaggtggaccagttaagccagcaaaatatctcgatggatcttccggaaaccctgcaaagccaggcgatgctggaaaaactgatgcagactcgcgtgcgtaacctgctggcacaaccggcagcggggacaacggaagctaaacctgcacctgcaccgcaagctgatactccggcagccgcgccgcaaggagaataaccatgctaaaagtgttattgctctttgtgttgctgattgcggggatcgtggttggcccgatgattgccggccatcagggttatgtgctgatccagaccgacaactacaatatcgaaaccagcgtcacgggcctggcgatcatattgattctggcgatggtagtgctgtttgccattgagtggctactgcggcggatcttccgcactggcgcgcacacccgtgggtggtttgtcggacgtaagcgtcgccgtgcacgtaagcagaccgaacaggcgctgctgaaactggcggaaggcgattatcagcaagttgaaaagctgatggcgaaaaatgccgatcacgcggaacaaccggtggtgaactatctactggctgccgaagccgcgcaacaacgtggtgatgaagcacgcgccaaccaacatctggaacgcgcagcggagctggccggcaacgacaccattccggtagaaatcacccgcgtacgtctgcaactggcccgtaatgaaaaccatgctgcacgccacggcgtggataagctgctggaagttacgccacgccatccggaagtattacgtctggcggaacaggcgtatatccgcacaggtgcatggagttcgctgctggatattatcccatcaatggcgaaagcccatgttggtgatgaagaacatcgtgcaatgctggaacaacaggcatggattggcctgatggatcaggcgcgtgccgataacggtagcgaaggtttgcgtaactggtggaaaaaccaaagccggaaaacgcgtcatcaggtagcgttgcaggtggcaatggcggaacatcttattgaatgtgacgatcatgatactgcccagcaaattatcatcgatggcctgaaacgccagtacgacgatcgcctactgctgccgattcctcgactgaaaacaaacaatccggaacagctggaaaaagtgctgcgccagcaaatcaaaaacgtcggcgatcgcccgctgttgtggagcacactgggccagtcactgatgaagcacggagaatggcaggaagcatcgctcgccttccgcgcagcgctgaaacaacgtccggacgcctacgattacgcatggcttgccgacgcgctggacagactgcacaagccggaagaagctgcagctatgcgtcgcgacggtttgatgttaacgttgcagaataacccgccacagtagttccttctcacccggaggcaagcacctccggggccttcctgatacataaaaaaacgcctgctcttattacggagcaggcgttaaaacaggtctgtatgacaacaagtgggtgcttcactcaacgttgtgtccatggtgtctgatgaggcataagcgacatctgtcagtggacgataagcaccgtaaacggctctgcgtcattccggagtttatgaggcactaaggcgaacataagagatggaatgagcatctactcgtttattatgccacagagaatcgggaaataacatcccttaacacttgttatgagataattctgtaatcctctttgcttcctgagtaataacttcctgagtgaatatttaacctgagcttgatcctacacatacttattatgaatgataaaattcattcaattaataacacatatattaattgccgttaaaactaaaaacagcatcaataatcaacgcgatataataaacctgccttacatatcaactgcgccagaggtaggattgaaaacgctctcctgattttccaattcattttctggataaataaataatttatttttgtcactattatttatgtaatcatcctgtcagggagagggatctcaattatcaatgcttaattacgtcatcattttgatgacatgaaaccggagcattttgcatggaattttcgttttcacccaaacgtcttgttgttgctgtcgccgccgctcttcctctcatggccagcgcagcagataccccgtcaactgccaccgcacgcaaaggctttgccggatacgatcacccaaaccagtatctggttaaaccggcgaccactattgccgacaatatgatgccagtaatgcagcatccggcgcaggataaagaaacccagcagaagctggcagaacttgagaaaaaaaccggtaagaaaccgaatgtggttgttttcttgctggacgatgtgggctggatggacgtcggttttaacggtggcggcgtggcggtgggtaaccctacaccagatatcgacgccgttgccagccaggggctgattttaacttcggcgtattctcaaccaagctcttccccaacccgcgccaccattctcaccggacaatactccatccaccacggcattctgatgccgccaatgtacgggcaaccgggcgggctgcaagggttaaccacgctgccgcagttgctgcacgatcagggctacgtcactcaggccatcggaaaatggcatatgggggaaaacaaagagtcgcagccgcagaacgttggctttgatgatttccgtggctttaactcggtgtctgatatgtacaccgaatggcgcgacgttcacgtcaatccggaagtggccctgagtccggaccgttctgaatacatcaagcaattaccgttcagcaaagatgacgttcatgcggtgcgcggcggcgaacaacaggccattgccgacattacgccgaaatatatggaagatctggatcaacgctggatggactatggcgttaagttcctcgacaagatggcgaagagcgataaaccattcttcctctactacggcactcgtggctgccacttcgataactacccaaatgcgaaatatgcgggtagctctccggcacgcacctcgtatggcgactgcatggtggagatgaacgatgtgttcgctaatctgtataaaacactggagaaaaacggtcagcttgataacacgctgatcgtctttacctccgataacggaccggaagccgaagtaccgccgcacggacgcaccccgttccgtggtgcgaaaggttcgacctgggaaggcggcgttcgcgtaccgactttcgtttactggaaagggatgatccaaccgcgtaaatctgacggtattgtcgatctggcagatctcttccctaccgcgctggatctggcagggcatcctggagcgaaagtggcgaatttagtgccgaaaaccacctttatcgatggtgtggaccagacatccttcttcctgggaacaaatggtcagtctaaccgtaaggccgagcactacttcctcaacggtaaactcgctgctgtgcgtatggatgagttcaagtatcacgtcctgattcagcaaccttacgcttatacccagagcggatatcagggtggattcaccggcacagtaatgcaaacggcgggatcgtcggtgtttaacctctacaccgatccgcaggaaagcgactccatcggcgtgcgccatattccgatgggtgtaccgctacagaccgaaatgcacgcgtatatggagatcctgaaaaaatatccaccacgcgcgcagattaaatctgactaagccggcgctatcgctgagatctgcctttgccggatgcgatgctgacgcatcttatccagcctacagaacgctgcaatttattgaatttgcacgatcatgtaggccggataaggcgtttacgccgcatccggcaatcaaccgcaggcggccgccgatttctacttactcaccaccagcaaatgcgcatgcataatgtcgctggccgggcgaccgtgcgccagcaaatcagccattgctttaagatatggcggtagatggcggaaataacgctgatacccggcacacaaataattcagtcccggtttgccgctggcatcgagcatgaagcggtgtttcgggcagcctccccagcacgcttttaacacgttacaactgcgacactgcgccggtaactgcttaaatttatcttcaccaaacgcctgctgttgcggggaatcgatcatttctgcaattgtttgctggtgcatattccccagccgatattgcggataaacatagtgatcacaggcgtaaacgtcgccgttgtgctcaacaatcaccgagcgcccacaggttggctgatgatggcaaaccgcacccggcgcaccgacaaaattggcaaacgcccattcgatattcatcacgaaaatcttgccgacgtcgcgtttgatccagtggtcgaatatcgccaccagaaactcaccgaactcctcggggcgcaccgaccattccgttagctcaccctgaatatcaccaggcgcatgtaacttaagtccatcgcgggcagttgtttcatcagccaggcgctcgaccaccggaataaactggatgaattcgactcccgcatcgcacaaaaaatcatatacctgcaacggttgctgcgcgctggtgcgattaacgcagaccagcacgttatagtcgacatgatgtttttgcaggagcgtcagggcacgcatcaccagcttatgcgtgggtctgccacctttagtcacgcgatattgattgtggatctcaggcgggccatccagcgataaaccaacaagaaaatgatgctccgcgagaaacgcgcaccattcgtcatccagcagcacgccgttagtctggaagctgttacttatcttcctgccagcaccatatttcgcctgtagcgctacggcacggcggtaaaacgccagcccgagtagcgttggttcgccgccctgccaggtaaaagccacttcgttttgcggttcgctggcagcgatatagtgacggacatacgcttccagcgtgtcatcgtccatatgcgtgactggcttttcgcggtaaagggattgtttttcgagataaaaacagtagtcacagttcagattacaatcggaaccgctcggtttcgccatcacatgaaaagcacgcgttggaacctgttgcagcatggtcgctccttgcctgaagtcatccttcaatacgttaagggcgaaatcataccgtggggcaatgagttattacgggcgtttattgcgaagggagggtgacgaaatgcacagaaaacaaaaaaccccgccgaagcggggttcaaaattggtcggcgagagaggattcgaacctccgacccactggtcccaaaccagttgcgctaccaagctgcgctactcgccgaaatactgctttttgaatttttagttcaattctttaaagtcgtggtgcgaggggggggacttgaacccccacgtccgtaaggacactaacacctgaagctagcgcgtctaccaattccgccaccttcgcattgtcacaacttctaataatggggtggctaatgggattcgaacccacgacaactggaatcacaatccagggctctaccaactgagctatagccaccactacaaatcttgttacgcggtattactaccaccgcagctcaagcgccgggactaaatggcgcgcccgacaggattcgaacctgagacctctgcctccggagggcagcgctctatccagctgagctacgggcgcttagcgccgttgcgggggtggataatacggacttcccacccctctgtctagtccctttttaaataaattgcgcgtttggttacggtttgtgcgttttgctgcttattcctccagtttatgcgctttcccgtggcgattaaggccaaaaactttataaatcgccgtcaccgccagcataaagatgatgccaacaaacagcgacatacgcgtatcttcattaaagtacatgccgatcaaaacgcaaatcaggaatgccattgttacgtaattggcccacgggaacaggattgagcggaacggatggctggcaatcgccgctttatgtgcacgccgaaaacgcagctggcttatcaatatcacaaaccatggcaccatccccggaagcacgctggcactgtagacgtagacaaacacacgctgcggattgggaatgatgtagttcaggcatgagccaattagcagaatagcaatagatactgccacacccgcaaccggtacgccgtgacgggaaactttcgccattgccgccggtaactgacggtttttcgccagtgcgtagagcatacgtccgcaactgtacatgccgctgttacagccagagagcgcagccgtcagcaccacaaagttgataatgcccgccgctgcggtaataccgattttggcaaaagtcagtacgaacgggctgccgttgctgcctatttcattccacgggaagatggtgacgataacgaaaatcgcgcctacgtagaaaatcaggatccgccacagcaccttgcctacggcactgcgcagcgtcacctgcggattcttcgcttcaccggcagtaatgccaatcagctccacgccctggtaggacgccaccacaatacacagagcggtcaggaaccctttccagccacccgcaaagaaaccgccatgctctgtgagattgctaaaaccaatcgactgcccgccattgccaaagccaaagaaaatcacgcccaggccaatgacaatcatcacgataatcgtggtgactttgatcatcgcgaaccagaactcgatttcgccgtacaaccgcaccgccgccagattcgccaacgccaccagcgccactgcgatcaatgcgggtatccactgcgccatctccgggaaccagaactggacataaacgccaatggcggtgatttcagagatccccaccgccatccacataaaccagtaagaccaggcggtgagatagccaaagaacgggctcatataacgatgcgcataaacggcgaacgaaccggtaaccggttcgaggaacaacatttcgcccattgaacgcatgatgaaaaagacgaacagcccggcgatgatataggccaacaatacggatggcccggcccatttcagggtactggcggcccccataaacaggccgacgccaatggtgccccccagggcgatgagttcgatatgtcgagcttccagcccacgctgtagctctggtttgttatctgccataaatcctcgtgttgtgtttgcatgctttccggtgttaccggttatcgttatgggtacatcgagtgttgcaaatgttttcgtaattcaggagaaatggcaaataaagcattaaaaatttgaatgctttgtgtaataaaaaagcagacaggcgacggagtgaccactccgtcgctttacaaagagaggaaaatcataggttgccggtgtagtgccagcgtaaataacgcagcaaacgaagctgacgcttaatgcggctcggctgcgaaagcaggcggtagagccactccagccccagcgtttgccagattttcggtgcgcgttttacgtgaccggtgaaaacatcgtaagtcccgccaacgcccatatacagcgcatctggatgtaccagacggcagtcgcgcatgatgatctcctgctttggcgatcccatcgcaacggtgacgatttgcgcaccgctggcatgaatgcgttcaaacagcgcctgacgctgctcgggtttaaaataaccatcctgactgccaacgatattcacattccactggttgcgcagtttagcttcagtttgcgccagcacttcaggtttaccgcccacaagaaataccggcgtcccttctttgcctgcgcgcgccatcagctcttcccagagatcggcaccggcaacgcgggaaacctgcgcctgcgggtactttttacgtactgaacgtacaacgctgatgccatccgcatatttaaattcggcagcgttaattaactccctgacctcggcgttatcttcaatagtcagcattttttcagcattaatggcaaccagcgttccctgcttaagctgcccgtcagcaaacagataatcgagggcgtgctgcatatcacgccaaccaatcaactgtaagccacgcagcgtataggttggtgccgtggtgttgttattcattgttatccttcaacctgcgtccggagcgatgattttgtacgtttatgaatgagtccggcgctttcaaaaagccagtacaacagttttgcgatcatcagacatgcgccgaagaccacgataaaaaagaccacgcgtgagacaaacgaatccagcccttcacgcgccagcacgatcatattgaagatcgccccaaagcagaaactgtgcaatatcgcagctttatagcgattaggctcgcggttgcccagctcatacagccagtcgaaccatttgatgatcagaccaaccacgatcgccccgagcgggatgaacaacgcgccgcccatcaccaccagtgagcctataagcgtaggcgagatcgccagtccggagtggttattcagcacttcccaggtaaagtagttggctgagttcagcaccatactcgggcgacccggccacagccaggaagggataaagacatagaaatcgcggacaattggagccaggccctggaagtcgatgttgtcgtagttctgcaacagcaacgccagattctcccacggcgagaaggtgtcgcgagtgagatagagaaacgtatagaacgcttcatcgccgctcacattcattccatagcgttttagtgccagccagaacatgccaacaatccccagcacgcccgccgccgccagcatccacaacgaaatccagccgcgaataatgccaataaacaggaagatagcgaatgcgatgatgatattggcgcgagtgccgccgacaatcatataagtcagcaagccaaaggcgaccgtgctgacgaggaaaaacagccacgctttgctgtcctggcgcagaaagtagaccaccagcatcgccgggatgaaaaagtaaaagaagcgttttaacgccacgccggagacttcactggaaaagatctgactgtaggagttaagccggaacagcaaaaagccgttgtgcatgaagaagatgccgacgcttaccagcgcgatacccatcaggatcacccacgtaagattggtctccacgcggttcatggtaaacagcggacggcgcggtacatcagcaacgcgtttgcgtaggcgggttttgtaggtgacatagtaaaccgcgtagaagcagcccgcagaaagcaacgcctgcaacaagatttctggcggcgcgacaccaacatcaaagcgaaataccagcacgctggtcagcgggaagccgaagaaaaaggtgagcaaaaacagcaatgaaaagaagacattgaagttaaagcgcacacggcgaaactcaaaccaggtcagcgtggcaataaacagcgtgcagagcagccagacaacaaacaggccactgaattgcagcagactcatgcgacctccctggcggcaatcgccaacgcccgctgccagccttgtagatagttagggctaaagaaggcaatggtgtttttatccaccgacgccaactggcgctgcgcttcacgcacaatatcctcgttgagatcgtcggtagtaaacagcaccggcaaatgttgttccgtcatatcctgccagaacggattttcccggttaagcacacaaggaatgcccgcctgaatcagtaagcacagcgtaccaatgccctgctggcgggcaaaaataaagtaaccaagatcgcactgacgaagtagcgccagataggcgtcaaattccagtttttcgctcagaatttgtagattttcttcgctgaataactccagccccgcctgacgaacttcctcaatgtacgcttcgttattaggcggatatcccatcggcaccaccacttttaccgtatcgccaaattgctgatgaacggcgcgcaaggcagcaatatgctcattgctgcggtcgccggagttccccaccagaatggtcattttcccttcacgttgccgatcgttcgccatcgtattgagcgaagggtccatccgcgtcgggaagaacagcagttcgccccgcacctttgggtgcgttttggcaaaaaagctcaaatcgccgcgggtggcaaatacacagccgactcgcttttgcgccaggcgacgtagtgggtaaaaaagcttatatctcaagccactggaaagctcatacaggtctgccccccagatatgccagaaaaactggctgggcttaatgccaccactcagcagagccagccacagtgtgggattgaactgaccgtggaagaaaaaacgctgctgacggttagcttttgctttcgcgatgaccgcttccgccagcgattttttcccagggaaaaattgcacagaaagcgccggacagctatcacttaagccgtcgtccttgccaacaaccataaactcgcgcgcgtgctcgctcgtcgcggccagcgcgtcattgaaaaaccgcaaaacggttcggttatggtgagggatatccgatcccagtacgtgaatcagtacagtcatgcccgcctacgccagagtaaaaacacgccacaacaaagagaaaaatagacgatataagttgccatatatgcctgcgccgcgcccagtgcaccatgcgcagggattagccagtgggcaaataccatcaataaagtgaactggctgacttccgccagaatataaaaccgcagtgacgctttggcgatcaccagataaccaaagacataagcgcccacttttaacacatcacccactaactgccaggcaaagagatcgcgcatagcggtaaatttattcgacaacagcagccagatagcaaaatcacgcagcagccagacggtaaaactcgccgccgccactgccggtaagacgaatttcagcgatttaaccacttcccgggtgatatcgcgcttttccgttagccgcgacaacgtgggcagcaaatatacgctgaacgatgccgtaataaattgcaggtaggcatcggaaatactgctcaccccttgccagatccccacctcatcccagctatactgcgccgccagcagtttacgcatcatgatgtaagcaacaggcaaggtcaccgacgtaatcaacgccatgagcgtaaatttgctcaactgccctgccagaccgttatcccagctgggtttcagatagcttaacgggatgacaccacgtttgatcaacatgatggcggcaggaattaccaccagcgcgggaatcagcgccagacccagcaacgccccttcataaccgcccaaacggtaactgacgtagtacgcgagaacgccaatcaagctgccgacaatcagcgataacgcattacctgcggcatcgcgaaagcctttcatcagcgccagtaacaggttgccccaggcgatccccatttgcaccagcgccactaaacgcaccagcccctgatagtcggtattaccaaacaatccctggctgattggcgcagctgccagcacaaaaaccagcgccatcagcgtagagaaaccaagtaccatcgctgatgaagtgccgaccacgcggcgcagctgttgcggattatcatggtactgggcaacgtatttggttacaccgttaaagatgccagccccggcaagcacgccgagcacggtaatcaactggcggaaatttgccgccagcccaagccccgccggaccaaatgacaccgccagcaacttaccgaccagtaacccggcaccaatcttgaccagtgtactggccgccgtccacaaggacgcttttgccaacgacatatcaggaaaagtagttcaacaaagtcgcaattaccgtacgctgattgacgggcgacaggttgtagaacagcggcaggcgcagcaggcgctcgctctctttggtggtgtagcgatcttcaccgtggaactcaccaaagtgttcccccgcagggcaaccgtgcagcggaatgtaatgaaacaccgccatgatttccgcttctttcagaaagttaatcaacgcgctccggtcatcaatatcccgcagtttaatgtagaacatatgcgcgttctgcacgcagccatcgggaatcgacggcagctcgatacgcccggctttcgccagaggcgctaacgcatcgtagtagttttgccacagcgccagacgttgctggttgatacgatccgctgcttccagttgcgcccacaggtatgcagcttgcagatcggacatcaaatagctggagccaatatcgcgccaggtatatttatcgacctgaccacggaagaactggctgcggttagtgcccttttcacggatgatctcggctcgttcgattaacgctttatcgttaatcagcgtcgcgccgccttcaccgcccgccgtgtagtttttggtttcatggaagctaaagcagccaatatgaccaatggttcccagtgcacgccctttgtaagtggacatcacgccctgagcggcatcttctaccacaaacaaattatgctttttcgccaacgccataatggtgtccatttcgcaggccacacccgcgtaatggaccggcacgataacgcgcgttttgtcggtgatcgccgcttcaatcagcgtttcgtcgatgttcatggtgtccgggcgaacatccacaaaaacgatttttgcgccacgcagcacaaaggcattggcggtggagacaaaggtgtagctcggcatgatcacttcatcgccaggctggatatcgagcagcagcgccgccatctccagcgaagcggtgcaggacggcgtcagtaacactttggcgctgccaaaacgttgctccagccactgctggcagcgacgggtaaaaccgccatcgccacacagtttgccgctacccattgccgactgcatatagtcgagttcggttcccaccaccggcggtgcgttaaatggaatcatgtgatcacctgtataaccagtacgcggtgctttctacattcgcaccactttgtatgtatcgtttaagcgcggcggtgttgcccatttgggtcgccacccgcaaagttgttttaccgcgagcatacgcccagtttagcgccgtttgcatcagctcagcacctgcaccgcgtccagccagcaggccaattcgcgcatctgtcgcattgagttcccgtaaagagacatagccgcgaatatcgccggacgccgcacgtaaaatcagacattgatgatcaaaggtgccgcgcacggcattttcaatccactgtgcataaaagcgactgctggcgtcaggcgcataccacggcgcacgaaaacggctttgcgcaaatgcggcgctggctaactgacgtaatgcgggaatatcggtctcttgtgccactacagcaccgctatcactggcattgttcacgggtagcgccaaatcaacttcaccttctaccagggagaatcccagctgttgcagggcatccagttcacccgtatttgatgccgcaattttggcctgcacccgtgaccacggcgctaacgcgtctggcgtcaggagcggtgcttcagacgtaatgcgcacgatggcgctgttaacaccaaagaaggcgttttcccaggttagtggctcaatactggcgcggacgggcacgaagtaactccagcagatattggccgtagccagttttcgctaatgaactggcagcacgcttcacaccctcgtcatcgagccagccgttacgccaggcaatctcttccaggcaggcaatcttaaagccctggcgtttttccaccgtctgtacaaaggtgctggcttcaatcaggctgtcgtgagtgccggtatccagccaggcaaatccgcgcccgagcagttcaacggtcaggttgcccgcctcgaggtacatctggttgatggaggtaatctccagttcaccacgctccgacggcttcacctgctttgcgtactccacgactttactgtcgtagaaataaagcccggtcaccgcccagtttgacttcggctgttttggcttttcttccagcgagatagcgcggaaattgtcgtcaaactccaccacgccaaagcgttccgggtccatcacctgatagccaaaaaccgtcgccccttcggtgcgcgccgcaacatgacgcagcttcggactgaagccctgaccgaagaagatgttatcgcccagcaccagacaagaaggttcaccattaaggaaggtttcaccgatgataaaggcctgcgccagaccgtccgggctgggctgttcggcatattccagctggataccgaactcactaccatcgcccagcaggcgctggaaataacctttatcttccggcgtagtgatgatgagaatttcgcggataccggccagcatcagcaccgacagcggatagtaaatcattggcttatcgtaaatcggcaacagttgcttcgatacgccgcgcgtaatcggatgcaatcgggtgccggaaccgcccgccaggataatacctttcatgtttgcctccgctgaaaattagcctttcagacctaaacgctcgccctgatagctgccgtcctgcacctgcttccaccagctttcattagccagataccactgaaccgttttacgcattccactttcaaaggtttcctgcggcagccagccaagttcacgggcaattttcgaagcatcaatggcataacgcagatcatgccccggacggtcagcgacaaaggtgatcaggtcacgatagtgcgccacgccgtgcggcttgttcggagccagttcttccagcagctcgcaaatggtttccacaacatcgagattcttacgctcgttgtgaccaccaatattataggtttcaccgactttcccggtggtcgccacgcaatacagcgcgcgggcgtgatcttccacatacagccagtcacggatttgctgcccgttgccatataccggcagcgatttacccgccagcgcgttgaggatcatcagcgggatcagtttttccggaaagtggtaagggccgtagttattcgagcagttggtgataagcgtcggcagaccataggtccgcagccaggcgcgcaccagatggtcgctgctggcttttgacgcggaataagggctgctcggcgcatacggcgtggtttcggtgaagaaatcatccgtcgagtgcaggtcaccatatacttcgtcagtggagatatgatgaaaacggaacgctgattttttatcttccgtcagcgcattccagtaagcccgcgccgcttcaagcaatgtataagtcccgacaatgttggtttcaataaacgctgccgggccgtcaatagaacggtcaacatggctttcggctgccagatgcatgacacagtctggctgatgctcagtgaatacgcgtgccagttctgcccgatcgcagatatcaactttctcaaaggcaaagcgctcgctttgcgcgaccggtgccagcgacatcaggtttccggcgtaggtcagcttatcgaccactaccaccgcgtcgctcgtttcgttgatgatataacgcaccagcgccgagccaataaacccggcaccacctgttatcagaatttttctcatcagcgccagactcctttggcatcgacgacatactgctgatggacattgtcgccattgataactttgaactgactatgatcgaccagcatcaccagcacgtctgccgttgccagcgcctcgtcaagctgcgccagagtacaaagcccggtcagttttttcggcaactggtggatgttaggctcaacaaccagagtttcgccgctatgccactgggcgatcagttcagcgatttccatcgccgggctttcgcgcaggtcatcaatattcggtttaaacgccagaccaaagcaggcgattttcagttcactggcgcgtttatcggtagccgccaggcaatcagccaccgccgctttcacctgatcgataacccagaacggtttgtgatcgttcacttcgcgcgcggtacggataagccgcgcctgctgggggttctgtgccacgataaaccacggatcaacagcaatgcagtgaccgcccacgccagggccaggctgaagaatattaacgcgagggtgacgattcgccaggcgaatcagttcccagacgttaatcccctgatcggcacaaatcagcgacaattcattagcaaaagcgatattcacatcgcggaagctgttttcggtgagcttacacatttccgccgtccgcgagttagtgacgacacactcaccttcgaggaaaattttgtacagttcgctggcgcgggccgaacaaaccggcgtcataccaccaatcacgcgatcgtttttaatcagctcgaccattacctgtcctggtaacacgcgttccgggcagtaagcaatgttgacgtccgcctgctcgcccacctgctgcgggaaagtgagatccggacgcatctctgctaaccattctgccatcttctcggttgaccccaccggcgaggtggattcaaggatcaccagcgcgccttttttcagcactggcgcaatggagcgagcagccgattcaacgtaggtcatatctggctcatgatcgcccttaaacggcgtgggtacagcaatcagccaggcatccgcttcaactggcgtcgtgctcgctcgtaaaaaaccgccttctacggcagtttttactacactcgccaaatcaggttcgacgatatggatttcgccacgattgatggtatcaaccgcatgttggttgatatcgacaccaattacctgtttttgccgtgaggcaaacgctgctgccgttggcagcccgatataacccagtccgataacagaaatggtcgcaaaactcatagtgatatccgattattttttaacgcttccagaatgcgagagcatgcctgaccatcaccatacgggttatgggcgcggctcatagcttgatattcgttttcgtcttttaaaagacgcgtcacttcctcgacaattcgctgcttatccgtgcctaccagacgcaccgtacccgccgtcaccgcttccggacgctcagtggtatcgcgcatcaccagcacaggtttccccagcgaaggcgcttcttcctgaatgccgcctgagtcggtcaaaatcagccaggcgtggttcatcagccagacaaacggtaaatactcctggggatcgatcagaatgacatttttcacatgccccagaatgcgattgaccggttctctgacgttcgggttgagatgcaccggatagacaatctggatgtcctggtgcgtggtggcgatgtctgccagcgcgtggcagatttcttcaaagccacgaccgaaactctcacgcctgtgaccggtcaccagaatcatctttttatcggggtcgataaacgggtaatttgccgccagttctgaacgcagcttgtcgctgctcatcacctggtcacgcacccataacagtgcatcaatgactgtattaccggtaatgaagattcggctatccgcaacgttttcacgcagcaagttttgccgggaagtttcggttggagagaagtgatacatcgccagatgcccggtcaatgtacggttagcctcttccggccacggcgaatagagatcgcccgtgcgcagaccagcctcaacgtgaccaacaggaatacgctgataaaacgccgccaggctggttgccagcgtcgtcgtcgtatcgccgtgaaccagcacgacgtctggtttgaactcggcaagaataggttttagcccttccagaatccgacaggttatctctgtcaggccctgtcctggctgcattatgttgagatcgtagtcaggtacaatggaaaagagtttcagcacctgatcgagcatctcccgatgctgcgcagtgacgcaaactttagcctcaaaaaaaggatcttttgccaacgcatgcaccaacggcgccatcttgatggcttccgggcgcgtaccaaatacagtcagtactttcacatcgattctcttcgaataagcggcgagcgcctttgcgctcaccgcagcagtgttgctatttcgagcaacggcgggttaatgcgacaccagccccgatcagccccccgacaatgccccacataatcatcaggaaggcacgacgtgggctatcgcgttttaccggttcttccggcgtacgcaaatagcgataggtctgaaaacgcggatccagggttggaccaacattcagggtgtttaacatggcccgattctgatcatagtcgagatcaaaggccggaccgacggcctgtaaattttccagtcgagcctgaagcattggacgcccaagcaggaacatttctgaatcaggtaattcctcggcaggtacatctgtcgcactgcgcgaaatattatgctgctcagcaattttcagcgcctgctcaatgctgttcatccggcggtcgtagatggctttcgccacctcttcctgacgcttcacctgagctttcatctggatggtacgcgccgcccatgcgcctttcagctcatcattcagatggctggctgcacgctggctggcaaaagcaacatactgacgtaacaggttattagcgtcaggcgcggtttcggcaataagcttcacgctgtcattgaccgcgcgggtaaagtctccggggataaactggatgttgttaatcatttcatccagcaacgccgcatcggctttgctgttgcccaccatccgctgtttgtaatagtcggtttgcagccagaactctctgcgggtatcccacgaggccagttgcataacaaactctttataggcttcgtccatgaccgatggttggtcggcagaagccatgtttgaacggacatccaggttacgcaaaaattgctgctgcgagtaatatccccccagcatattcaccgttggacgatcggtaatcgccgtcgagctccactcctgacgagcaaaaaacgtatacgccagcgcgattaacgcaaacgccagccccatgccaataatccatagcttcccagcccacaaggtacgaaacaacccacgaatatccagttcattttcagcgtcttcggccggtttcccaggcattggttgtgtcatcacatcctcatttatttggttaaattggggctgccaccacgatttctacgcagtctgcgttttacgcgcttaataaagcgagcaactttccaggcacgcttaatgcaatatccatagaggaagaatgctagcaaaaagagcaccagcatgacccactccgggacaaaatgagaatattctgccagcacgccaatggaagcgagcagtgctgcggcaagggtaatcagcacaaacgcctgacgggaagtaaacccggcacgcatgatcaaatggtgaatatgctgacggtcaggagagaatgggctcatgcctttacgcaggcgacggtacataatcgccaccatatccattagcggaatggcgattatccacaaagcggtaaccgggctgatgggatgggttttgccctgggtcgtttcgagcaggatccagataacggtaaaaccaatcagcgtactgcccgcatcacccataaagactttgtagcggcgacccaggataccaaggttaagcatgatgtatggcaggatggcggcgatcatcgcaaagcaccagattgcgaggctggtttgcccgtcgaaccacaaaatcataccgattgctgcaaacgagacgcaggacaacccgcccagcaagccatcaatgccatcaaccatgttgaacgcattaatggccgcccagacggcaaatagcgtcaggaagtaaccaaacggtccgagcaccatctcccaggagccaaagatataacccaggctactgagataaagcttgccgaacaccatcataacaatgccaacagcggcctgtatggtggcacggatttttacgctgatatcaaaacggtcatccagcgcgccaatgaaaacaagcacaccggcacaagcgagatagagagatgcatgcggaatatagtaatcgacaattccgaacgtgaagcaaatccctgcgtaaaccgaaatccccccaacgagaggtatcaatccctggtgacgtttgcggaagtttggtttatccactaaaccgactttttttgccaccttacgggcaaaaaacagaaacagtgtcgtgaataaaaaaatactgatgagatcagtactcactgtcagtaaattcacaatgcatgctctcagagaaaattattagcagaagtataaccacgaagacctttattcagaagggaaagtccgttccaaacccaccagtcctgtgcaaaaattaaccatttgatatgcaaattgcataacatgccagcaaattccaggaattttcctaacatcgccagcgcggcattaagattacagatataaaagcaaaacgccacgtaaacacgtggcgtttttggcataagacaaatttatgagcgtttcatcatttcgaagaaatcgtcattggtcttggtcattgccagtttattaatgaggaattccattgcatcgatttcgcccatcgggtgaatgattttgcgcaggatccacattttctgcagttcttcctgagtcgtgagcagctcttctttacgggtaccagaacggttgtagtcgatagccgggaagacgcgtttttcagcgatcttacgagagaggtgcagttccatgttgcctgtacctttaaactcttcgtagataacttcgtccattttagaaccggtatcgataagcgccgtcgcgataatggtcaggctgccgccctcttccacgttacgcgccgcaccaaagaagcgtttcggacgatgcagggcgttggcatccacaccaccggtcaacactttacctgacgccggaacaacggtgttgtaagcgcgcgccagacgagtgatggagtcgagcagaatgataacgtctttcttgtgctcaaccaggcgtttggccttctcgatcaccatttccgcaacctgaacgtggcgagatgcgggttcgtcaaaggtagaagcaacaacttcaccttttaccagacgctgcatctcggttacttcttccggacgttcgtcgatcagcagaaccatcagcacacaatccgggtggttgtaagcaatgctctgagcaatgttctgcagcagcatggttttaccggctttcggcggtgccacaatcagaccacgctgaccacgaccgataggtgatgccagatccagtacgcgagcagttaaatcttcagtagaaccgttaccacgttccatacgcagacgagagtttgcgtgcagcggggttaagttctcaaagaggattttgttgcgggcgttttcaggtttgtcgaagttaacttcgttaactttcagcagcgcaaaatagcgttcaccttctttcggcgggcgaatcttaccagagatggtatcaccagtgcggaggttgaaacggcggatttggctaggggaaacgtagatgtcatcaggaccggcgaggtaggagctgtctgcggaacggaggaaaccaaatccatcctgcaatatctccagtacgccatcaccaaagatatcttcgccactctttgcgtgctgcttcaggatggcaaaaataatgtcctgcttacgcatacgagccaggttttccagccccatattttcgccgagagtgatcagctcagaaaccggcgtattctttaattcggtaagattcatagtggtgtgagttcttaaacttggggtaaatctcgaacttaatgttgtgaatggtatggcaggatcatccatgcctgtttacggtcatcgactcatgtcttttcgctgcctggtcacaggagagtacgcagaactgaaacgacaagacggattgagtgacgagccagaaatctgttcacttcgcatttaagataaaacgggaagcgttggaaattacaagattcaaacttaataaggtatgtttaatacgaagtcaacactaagttagcatgactcacgccgggcgtccagtttttagcgacggggcacccgaacatgaaattcccttacgccaggttagcgtcgaggaactctttcaactgacctttagacagtgcacccactttggttgccgccacttcaccgtttttgaacagcagcagagtcgggataccacggatgccatatttcggcgcagtgccagggttttgatcgatgttcagttttgcaacggtcagtttgccctgatattcgtcagcgatttcatccagaatcggggcgatcattttgcacggaccgcaccactctgcccagaaatcgacgaggatcgccccgtccgctttgagtacatccgtgtcaaaactgtcgtcagtcaggtgaataattttatcgctcatatataactccacaggaataagcctggcgtgttggtttcgttgttggtgtaacattaaccaactaaaggttgactttatttcaccggatacgctttcgtaaagcaatagtaagctgatattctaccacactatgagcaaaacacatttaacagaacagaagttttccgacttcgccctgcatccgaaggttgtagaagcccttgaaaaaaaagggtttcataactgtacgcccattcaggcactggcccttccgctgacgctggcgggtcgtgacgtagccgggcaggcgcaaaccggtaccgggaaaacgatggcgtttcttacgtcaacgtttcattatcttctctctcatcctgcgattgccgatcgcaaggtgaatcagccgcgtgccttaattatggcaccgacgcgtgaacttgccgtgcagatccatgccgacgcagaaccgctggcggaagctactggcctgaagctgggtctggcttacggtggtgatggctacgacaaacagctgaaagtgctggaaagcggcgttgacattctgattggcaccacggggcgtttaattgactacgccaagcagaaccacattaacctcggtgccattcaggtggtggtactggacgaagccgatcgcatgtacgatctgggctttattaaagatatccgctggctgttccgccgtatgccgcctgcaaaccagcgcctcaacatgctgttctccgccacgctttcgtaccgggtacgtgaactggcgttcgagcagatgaacaatgccgaatatattgaagtggaaccggaacagaaaacgggccaccgtattaaagaagagcttttctacccttctaacgaagaaaaaatgcgtttgctgcaaacgctgatcgaagaagagtggccagacagagcgattattttcgccaacaccaaacaccgttgtgaagagatctggggccacctggcagcagatggtcatcgtgtcggtttattgacaggcgatgtcgcgcagaaaaaacgtctgcgtattcttgatgaatttacccgtggcgatctggatattctggttgccaccgacgttgccgcgcgtggtttgcatattccggcagtgacgcacgtctttaactacgatttacccgatgactgtgaagattacgttcaccgtattggtcgtacaggtcgcgcaggcgcaagcggtcactctatcagcctggcgtgtgaagagtatgcattgaatttgcctgctattgagacctatattggtcactcaattccggtaagcaaatacaatccggacgcattgatgaccgatctgccaaaaccgctgcgcctcacgcgcccgcgcacaggcaatggtccgcgtcgtactggcgctccgcgtaatcgtcgtcgttcaggttaaataaaaaatgtcatactcaaaatcattcaaactgtatcaagatggcaagagaatgaatcccgatgagcttactgtagtaagtgattcaggtgaaagaatgcagccaacacagagacagattgaaggatgaagagtatgggttccacctcgtcgctgtatgcagccattgatctcggttcgaatagttttcatatgctggttgtgcgcgaggtggctggaagcatccagacgctgacgcgaataaaacgcaaagtgcgtctggctgctggcctgaatagcgaaaatgccctctccaatgaagcaatggagcgcggttggcaatgtttgcgcctgtttgctgaacgtctgcaagatattcctccctcgcaaattcgcgttgtcgctacggcgacgttacgccttgccgtcaatgcgggtgattttattgccaaagcgcaggaaattctcggttgtccggtacaggtgatcagcggtgaagaggaagcacgtctgatttatcagggcgttgctcacaccactggtggtgccgatcagcgcctggtggtggatataggcggagccagtactgaactggtaaccggcacgggtgcacaaaccacctcgttgttcagcctgtcgatgggctgcgtcacctggctggaacgctattttgccgatcgtaatctggggcaggaaaattttgatgctgcagaaaaagcggcacgcgaagtgttacgtccggttgccgatgaattacggtatcacggctggaaagtgtgcgttggtgcttccggcaccgtgcaggcgttacaggaaatcatgatggcacaggggatggatgaacgcattaccctggaaaagttgcagcaattgaaacagcgagccattcattgcggtcggctggaggaactggagattgacgggctgacgctggaacgtgcgttagtgttcccgagtggtctggcgatcctgatcgccatttttaccgaactgaatattcagtgtatgaccctggcgggcggtgcgctgcgtgaaggcctggtctacggcatgttgcatctggccgtcgagcaggatattcgcagccgtacgctgcgtaatattcaacgccgctttatgatcgatattgatcaggcacagcgcgtagccaaagttgcggctaacttcttcgatcaggtggaaaacgaatggcatcttgaagcaataagccgcgatttgctcatcagcgcctgtcagcttcatgaaatcggcctgagcgttgacttcaaacaagcgccgcaacacgctgcttatctggtgcgtaatctggatcttcccggttttacccccgcacagaaaaaattgctggcgacgctactgctcaaccagactaatccggtcgatctctcatcgctgcatcagcaaaatgccgtaccgccgcgcgtcgcagaacaactctgccgtttactacgcctggccatcatttttgccagccgtcgccgtgacgatctcgtgccagagatgacattacaggctaaccatgaactgttgaccttgacgcttccgcaaggttggctaacccaacatccgctgggtaaagagattattgctcaggaaagccagtggcagagctatgtccactggccgctggaagtgcattaatgagtaagtgccggatgcgatgctgacgcatcttttccggccttgattatttccctcgttttgccgccatcatcgctttcagattcgccagatggctttgccctttctgcatccgttcttcggcgctgaccactttgcgctcctgttcccaaatcagatcatcctgcggcagctccagcaaaaagcggctcggctccgggcgcaccagttcgccgtactgacggcgttctttacacagcgtaaaggtcaattccttctgggcgcgggtaatgccgacataggccagccgccgctcctcatcgatattatcttcatcgatgctgctctggtgcggcaaaaacccttcttccataccgaccatgtagacataaggaaactccagccctttcgacgcgtggagagtcatcagttgcacctgatccagctcttcttcactctcaccacgctccatcatgtcgcgcaaagtaaagcgcgtcaccacctgggtgagcgtcatcggctcatccagttcactgccttccagcatctccgtcatccagctaaacagttggttgacgttcttcatgcgcatttcggcggctttcgggctgggcgatgtttcgtacagccaggattcataatccatgccatggatcagatcacgcaccgcggcaatcggctcccgctccgccagacgctggatttctgccaaccagtgagtgaagcgggtcaatgcttcataaccacgtccgctaagcgtctgactcaggcccatatcaaagctggcggtaaacatgcttttattgcgcgtcatcgcccactcacccagctttttcagcgtagccgggccaatctctcgcttcggcgtgttaacgatacgcagaaatgcgctgtcatcgtccgggttagtcagcacgcgcagataagccagcaagtccttgatttcaggacgagagaaaaacgacgtaccaccagatattttgtacgggatgcggttttgcatcaggaatttttcaaacacccgcgactgatggttaccgcgataaagaatggcgtaatctttgtactgcgttttattgacgaagtgatgggcgatcagctcgccagtaacgcgctcagcctcatgttcttcgttattcgcgcttaatacttttagctccgcgccataacccagttcggagaacagacgcttttcaaagacgtgcgggttattggcgatcaggatgttcgccgctttcagaatacgcccggaagagcgatagttctgctcaagcttaatcaccttcagcgccggaaaatcctgactcagcagcaccaggttttgcggacgtgcaccgcgccaggagtagatcgactggtcatcgtcacccaccacggtaaagcgcgcgcggctgcccaccagcagtttcaccagctcatactggctggtgttggtgtcctgatactcatccaccagcagatagcgaattttgttctgccagcgcttgcggacttcttcattgcgttgcagcagcaacgtcggcaataaaatcagatcatcgaagtcgagaacgttacaggctttcaggtgtgcatcatacagcccataacaatgggcaaaaatacggtcccgctcgccaatcgcacttgctgccgcctgggacggtgttttgagatcattcttccagttagagatggtcgaaatcagttgttgcaggagaactttgtcatcttcaatcagcccctcggtcaactctttaagcaaagcaagctgatcggtatcgtcaaacaacgagaagttcgctttcatcccaagcgccgcatactcgcgtttgatgatatccagccccaacgtatggaaagtggagatcatcagcccacgcgcctctttgcgccccagcgtctgccctacacgctctttcatctcgcgcgctgctttattagtaaaggtcaccgccgcaatgtgccgcgcctgataaccgcaaccgcggatcagatgggcgattttattggtgataacacgagttttaccggaacccgcgcccgccagcaccaggcaggggccggtaacgaattcgacagcttgttgttggccggggtttagacgcataggtgtattgctcaatcttcgaacggggggaggattgtagcagaatcgcatttgaatgtgaccgcgtgtaagccgctaaccggttggctgcggatgtttaaatcagagagagaagaccgaaatcggagttcatcgtgaatccattagacttagaaaatatcgggtcgtaacgttgtgttattactttttcagagtttactaaggagaggtttactcgtggcgattaatttcagccctaaggttggtgaaatactggaatgcaactttggtaactatcctgttagccaaaatggaccgttcagcacgacgtattacgatggccgcattcctcctgaaatgataaaaaacaggttagttgtcgtgctcaacggaaaaattaatggcaacgcatgcatcgtcgttccattatcaaccactcgcgaccagacaagttaaaacgtggaatgcatgttgaaatagccagtaatgttatcaatgacctgcaattctttgatcagcagattcgttgggccaaagccgacctggtacaacaagtcagtcgaaacagattaaacagagcaaggacttacagagggtatcttaatcaatgtttgccacatgagttggttgcagacatacagagggcggtcatcaagtcaatcaatgccatatcgctcataaattgacaataaaataaccatccccgataatgactttgtagcccatagaggccctaagttttctccccttgagggacctgcgaagcccggattttccgggcttttgccatatatgtaccagccactccctgactgacaattacgttagcatctgcggatcatgctaaaatcgccgcctgacaattattcactcaaggcacgatcatggcaaaaacagcagcagcactgcatatccttgtaaaagaagagaaactggctctggatcttctcgagcagattaagaacggggccgatttcggcaagctggcgaagaaacactccatttgcccatcaggcaaacgcggcggtgatttaggtgaattccgccagggtcagatggttccggcgttcgataaagtggttttctcttgtccggtactggagccgaccggcccgctgcacacccagttcggatatcacatcattaaggtgctgtaccgcaactaatagcaaggccttctccaggagaaggccttgagtgttttctccctctccctgtgggagagggtcggggtgagggcatcagcgcgcacttaacccgcaacagcaatacgtttcatatctgtcatatagccgcgcagtttcttacctacctgctcaatcgcatggctgcgaatcgcttcgttcacatcacgcagttgcccgttatctaccgcgccttccggaatagctttacccaggtcgcccggttgcagctctgccataaacggtttcagcaacggcacacaagcgtaagagaacagatagttaccgtactcagcggtatcagagataaccacgttcatttcgtacagacgcttacgggcgatggtgttggcaatcagcggcagctcgtgcagtgattcataatatgcagactcttcaatgatgccggaatcgaccatggtttcgaacgccagttcaacgcccgctttcaccatcgcaatcatcagtacgcctttatcgaagtactcctgctcgccgattttgccttcatactgcggcgcggtttcaaacgcggttttgccggtctcttcacgccaggtcagcagtttcttatcatcgttggcccagtccgccatcataccggaagagaattcgccggagatgatgtcgtccatatgtttctggaacaggggtgccatgatctctttcagctgttcagaaagcgcataagcacgcagtttcgccgggttagagagacggtccatcatcagggtgatgccgccctgtttcagtgcttcggtgatggtttcccaaccgaactgaatcagtttttctgcgtatgctggatcggtaccttcttccaccagcttgtcgaagcacagcagagagccagcctgcaacataccgcacaggatggtttgctcgcccatcaggtcagatttcacttccgcaacgaaggacgattccagcacacccgcacggtgaccaccggttgcagccgcccaggctttggcaatcgccatgccttcgcctttcggatcgttttccgggtgaacggcaatcagcgtcggtacgccgaacccacgtttgtactcttcacgcacttcggtgcctgggcatttcggcgcaaccatcactacggtgatatctttacggatctgctcgcccacttcgacgatgttgaaaccgtgcgagtagcccagcgccgcgccgtctttcatcagtggctgtacggtgcgcactacatcagagtgctgcttgtccggcgtcaggttaatcaccagatccgcctgtgggatcagttcttcgtaagtacccactttaaaaccattttcggtcgctttacgccaggacgcgcgcttctcggcaatcgcttctttacgcagagcgtaggagatatcgagaccagaatcacgcatgttcaggccctggttcagaccctgtgcgccacagccgacgatgactacttttttaccctgaaggtagctcgcgccatcggcgaattcatcgcggcccataaagcgacatttgcccagctgtgccagctgctggcgcagattcagtgtattgaagtagttagccatggtgattcctcgtgatgttgtgcttcttattgttcggttcgcgtttgcgagattgaattcactatatgacaggaaatttattgcggaaattgatatattcacaacgtcacattgcaatttttgcaacgtcaacatcgagggctgtccctgtggatttacgcgatctgaaaaccttcctgcatctggcggaaagccgccattttggccgcagcgcgcgggcgatgcacgttagcccatccacgctctcacggcagattcagcgcctggaagaagatctcggtcagccgctgtttgtgcgcgataaccgcacggtgacgctgactgaagcgggcgaagagctgcgcgttttcgcccagcaaacgctgttgcagtatcagcagttgcgccacaccatcgatcagcaagggccgtcgctctctggcgaattacatatcttctgctcggtgaccgctgcctacagccatctgccgccgattctggatcgcttccgcgcggaacacccgtcggtggagattaaacttactactggtgatgcggcagatgcgatggaaaaggtggtcactggtgaagcggatctggcgattgcgggtaaaccggaaaccttgcccggcgcagtggcgttttcgatgctggagaatctggcagtagtgctgattgcccccgcgctgccctgcccggtgcgtaatcaggtgtcggtagagaagccggactggtcaacggtgccgtttattatggccgatcaggggccggtacgccgccgcattgaactgtggtttcgacgcaataaaatcagtaacccgatgatttacgccacggttggcgggcatgaagcgatggtatcgatggtggcactcggctgtggcgtggcattgttgccggaagtggtgctggaaaacagccccgaaccggtgcgtaaccgcgtgatgattttagagcgcagcgatgagaaaacgccgtttgagctgggcgtgtgtgcgcagaaaaagcggctacatgagccgctaattgaggcattctggaagattttgccgaaccacaaatgacgttgtcgcgcgggtaggcctgataagcgaagcgctatcaggcatttttccctaacccgccaaaaagaacctgaacgccgggttattggtttcgtcgtggcaatcgtagcccagctcattcagccgggtttcgaaatccggttcatggtcgccaagttcgaacgccgccagtacgcgcccgtagtcggtgccatggctgcgatagtggaacaaagaaatgttccagtacgtacccagcgtgttgaggaagcgcagcagcgcgcccggtgattccgggaattcgaagctgtagaggcgttcctgcaacggatgcgatggacgtccgccgaccatatagcgcacgtgtagcttcgccatttcgtcgtcggagagatcaaccacgctgtagccgccgtcgttgagcatctgcaaaatttctttgcgctcttcgaggccgcggctcaggcgcacaccgacaaagatgcaggcgtttttggcatcggcaaaacggtagttgaactcggtgaccgaacgcccgccaagcagttggcagaatttgaggaagctgcctttttcttccggaatggtcaccgccaacaacgcttcacgctgttcgcccagttcgcagcgttctgagacgtagcgcaggccgtggaagttcacgttggcaccggaaagaatatgcgccagccgttcgccgcgaatgttgtgcagggcgatatattttttcattcccgccagcgccagcgcgccagagggttccgccaccgcgcgcacatcttcgaataaatccttcatcgccgcacagatcgcatcgctatcgacggtgatgatgtcgtcgagatactcctggcataaacggaaggtttcgtcaccgatgcgttttaccgctacgccttcagcaaatagccctacgcgcggcagatcaaccggatgacccgcatccagcgctgctttcaggcaggcggagtcttccgcttctacggcgatcactttgatttgcggcatcagttgtttgatcagcaccgccacgccagcagccagaccgccgccgccgactggcacaaatacgcggtcgagatgggcgtcctgctggagcagttccagcgccagcgtgccttgcccggcaatcaccatcggatggtcgaacggcggcacccaggtgaacccctgctgctgtgacagttcgatcgctttggctttcgcttcatcaaagttcgcgccgtggagcagcacttcgccgccgaagccgcgcaccgcgtcgactttgatgtcggcggtggcggttggcataacgatcagggccttcacgcctaaccgcgcagaagaaaacgcgacgccctgcgcgtggttacccgcagaagcagtgatcacgccgtgcgctttctgttcttccgtcaggcccgccatcatggcgtatgcgccgcgcagcttaaagctgtgcactggctggcgatcttcgcgcttcaccagaatgacgttatcaagacgcgacgacagtttttccattttttgtagcggcgtaacctgcgccgcctcgtaaaccggcgcgcgcagcactgctcttaaatattcggcaccttccggagcaccggacaggggttgcgagtcagccattattaaccccccagtttcgatttatcgcgcaccgcgcctttgtcggcgctggttgccaggctggcataagcacgcagggcaaaggagacctgacgttcacgatttttcggcgtccaggctttgtcacctcgagcgtcctgcgcttcacgacgcgccgccagttcggcatcgcttacctgtaactgaatgccacggttcgggatgtcgatagcgatcaggtcaccatcttcaatcaggccaatgctgccgccgcttgccgcttccggtgagacgtggccgatggaaagaccagaggtgccaccagagaaacgaccgtcggtgatcagcgcacaggctttgccgagacccattgatttcaggaagctggttgggtagagcatttcctgcatccccggaccgcctttcgggccttcatagcgaattactaccacatctccggcgacaactttaccgccgagaatcgcttctaccgcatcgtcctggctttcgtacactttcgccgggccggtgaatttgaggatgctgtcatcgacgcctgccgttttcacgatgcagccgttttccgcaaagttaccgtagagcaccgccaggccgccgtctttgctgtaggcgtgttccagcgagcggatacagccattggcgcgatcgtcgtccagcgtatcccaacggcaatcttgcgagaatgcctgtgtggtacgaatgcctgcaggacctgcgcggaacatattttttaccgcgtcatcctgggtcagcataacgtcgtattgttccagcgtttgcggcaacgtcaggccaagtacgtttttcacatcacggttcagtaaccccgcgcgatccagttcgccgagaataccgataacaccaccagcacggtgaacatcttccatatggtatttctgggtgctcggcgcaactttacacagctgtggaaccttgcgggaaagcttatcgatatcactcatggtgaagtcgatttccgcttcctgcgccgccgccagcaggtgaagtacggtgttagtcgatccacccatcgcgatatccagcgtcatggcgttttcaaacgccgccttactggcgatattacgcggcagtgcactttcgtcgttttgctcgtaataacgtttggtcaattcaacaatgcgtttaccagcattaaggaacagctgcttacggtcggcgtgggttgccagcagcgagccgttgcccggctgcgacaggcccagcgcttcggtcaggcagttcattgagttagcggtaaacatcccggagcaggaaccgcaggtcggacacgcggaacgttcaacctgatcgctctgggagtcagatactttcgggtctgcgccctggatcatcgcatcaaccagatcgagcttgatgatctgatcggaaagtttggttttcccggcctccatcgggccgccggaaacaaagatcaccggaatattcaggcgcagggaagccatcagcatccccggggtgattttgtcgcagttagagatgcagaccatggcgtcggcgcagtgggcgttgaccatatactcaacggaatcagcgatcagttcgcgagatggcagtgaataaagcatccccccgtggcccatggcaatcccatcatccaccgcaatggtgttgaactctttggcaacgccgccagccgcttcaatttgttcggcgaccagtttaccgagatcgcgcagatggacgtgacccggtacaaattgggtgaacgagttcacaaccgcgataatcggcttaccgaaatcggcgtcggtcattccggtggcgcgccacagcgcacgagcacccgccatattacgaccatgagtggtggtggcggaacggtacttaggcatactttatttactcccagtgtctgtctcgtaaatgggacggtgcgtgccgtcccattttttgtatttattgattaacttgatctaaccagccccatttatcttcggtttcgccagtgaagaggccgaagaaggcttgctgaatgcgtttggtaaccgggccacaacggccttcgccaacctgaataccgtctacgctgcgcactggcgtgatttctgccgccgtaccggacataaacacttcatccgccaggtacagggattcgcgcgacagcacctgctcacgtacttcaattcccagctctttcgccagtttgatgatggcatcacgggtaatacccggcagcgcggaggaggtgaacggtggggtgaacagcacaccatctttcacttcaaacaggttttcgcctgcgccttcagagatataaccgttcacatccagcgcgataccttcctgataaccgtggcggcgcgcttcgctacccaccagcagggaagagaggtagttaccaccggcttttgccgccgtcgggatggtgtttggtgctgcgcggttccaggaggaaaccatcgcatcgatcccctgctccagcgcttctgcgcccagatacgctccccacgggaaagcagcgataatcacgtcggttgagtatcccgctggcgggtttactcccatgccaacatcaccgacgaagatcagcggacggatataggcgctggtgagattgtttttgcggatcacgtcacgacaagcttccatcagctcatcaatgctctgcgaaaccgggaagcgatagattttggcggagtcatgcagacgctgcatatgctcacgatggcggaatacaaccggtcctttgtgcgagtcgtagcaacggatgccttcaaaaaccgaagtgccatagtgcagcgcgtgcgacatcacatgcaccttcgcgtcttcccagcgaaccatctccccattgaaccaaatgtaatcagctttcttcgtggtcatttttatattccttttgcgctcaggcgcggatttgttgtgatgtggttgtgctctggcagatggcaacgtgtgcgacgtccaccagtttatttaactgactaaacagtaagtcgaccgaccgtgggctggcaacggtcaattcgatatttatattttgtgcatcgctggcggcggccatattcattgagcagacgtggaaaccacgatgacgcaccacgcgtaaaacacgttctaaggtttctggattgaagcgagccgatacattgacctgatgttgcatcatgataatttctccaacatttctgaattactggcgccaggcggcaccagcggccagacgttctcaagttcgtcgattgagacatgaagcaggtatggcccatcactgttcagcatggtgtcgagtgccgcttcaacctggtctttccgggtgatgtgttggccatggatgccgaaggcgctggctaacatgaggaaatcggggttatcagtaagggtggtttcgctgtatcgttcctgaaaaaacagttgctgccattgtcgaaccatccctaaccgttggttatcgagtaagacgattttcaacggtaactgcttgcgttttacggtgcccagctcttgcacattcatcatgaaagagccgtcaccggagatacagacaacggtatcgttcggtcgcgcgacttgtgcgccaaccgccgccggtaaaccaaaacccatggtacctaaaccgctggaggtgatgaaattttccgggcgagtgtgggcgatgtgctgcgcagcccacatctggtgctgccccacatctgtggtcacgacgcaatccgcaggtttacgatccgacagttgttttaacaacaacggcgcgtagatagcgtcaccgggatggtcgtaacgccaggaatgttcatcacgcagctgcgcgcagtgttgctgccagtcattgatttaacggctgctgtaatgctggtaacagagcatttaaatcaccttgtaatgccacatgtgcctgacgcagcttgttcatttctgccgggtcgatatccatatggataacactggcgtgtggcgcgaaggtgttcagtttgccggtcacccggtcatcaaaacgtgcgcccacggcgatcagcaggtcacactcctgcaccgcgaagtttgccgctttggtgccgtgcatccccagcatgcccagatagtacggataatctgcttctactgcgcccagccctttcagcgtacaggtggcaggcatttttgtggcagcgagaaattcacgcaaagccggaactgcctgcgccatacccacgccaccgccaacgtacagcatcggtttttgcgcttttgccagcatctggcgcgcttgctcaacttcggcatgtgggaaagtcacttcgttttcaacggtggtgaaccacggttccaggtcaccgctggctaactggatatcttttgggatatcgaccagaaccggaccaggacgacctgagcaggcaacgtcgaatgcttcagccatgatgcgcggcaactcttccagcgactgcaccagaaagctgtgcttggtacaggctaacgacaatcccaggacatccacttcctgaaatgcgtcagtgccgataaacggtgcggacacttgaccggtgatggcaacaacagggatggaatctaacagtgcgtccgcaagcccggttatcaggttggttgcgcccggaccagacgtggcgatacatacgccagttttgccggtagcacgagcataaccgatagccgccattgccgcaccctgctcatgtcggcatagcaagtgctccacgccgccgtcatacaatgcatcgtaaaccggcataattgcgccacccggataaccgaaaacggtgttcacaccctgtgcccgcaacgcatgtaccacccactgtgcgccattcatagttagttccccgtcctgaatcttgagaaacagaattttgtgctgttattcattgtctgctcctcggttatgtttttaaggtcaaaaaaaacccccggacctttcggtgcgggggtcttagttcgttaaggcttgatctctaagcctttcctcgtccaagtgcagccccgcacggtgggataataatcaccaccacgctaatcacgaccaggctaatcactcgtagaagggctgtcattttgtcttttcttgcatcttgttcgaaggaatgcctaaagagttaccataggttttgtaaatagtacaagatattttttggccgatttttatgatgcgtttaataatttcaatataaattgttgttttttaaaaataaaatagtgagtgaaaaaaattcaatttcagtatgaatgttgttcccttcctcgtagttcatcctttgtccgctgcatttttgcgagcatcattccaccgccagaacaactcaacttcacttgcacaaataaacaggaatcagccactaaaattcacgaattagcgggctacagcagcgatatcttatgcacataatggtgactcaaggagggcttatgtcactgtcaattgttcatacccgcgcagccctgggagtaaatgcgcccccgatcactgttgaggtacatatcagtaaaggtctacccggcttaacgatggtgggcttaccagaaacaacggtaaaagaagctcgcgatcgcgtgcgcagcgccattatcaatagcggatatgaatatccggcgaaaaaaatcaccatcaacctggctccagctgatctgccaaaagaagggggacgatatgatttacctatcgccattgcgttgctggcggcctcagaacagcttacagccaataagttagatgaatatgaattagtcggagaactggcgcttacaggcgctctgcgtggcgttcccggcgcaatctccagtgcaactgaagctattaagtcgggcagaaaaattatcgtcgcgaaagataacgaagatgaagtggggctaattaacggtgaaggatgcctgatagccgatcatctgcaagctgtctgtgcgtttctggaaggtaagcacgctctcgaacgcccgaaaccaactgatgcagtatcccgggcgctacaacatgatctcagtgatgttatcggtcaggaacaaggaaagcgaggactggaaattaccgctgctggcgggcacaaccttttactgattgggccgccgggaacaggtaaaacaatgctcgccagccgtattaatggcctgttgccagatttaagcaatgaagaggcactggagagtgctgcgatattaagtctggtaaatgctgaatcagtacaaaaacaatggcggcagcgcccgttccgctcacctcatcacagtgcatcgttaactgcgatggtaggcggtggcgcaattccagggcccggtgaaatttcgctggcgcataacggcgtgctttttcttgatgagctacctgaatttgaacggcgtacactggatgccttgcgagagccgattgaatccgggcagatccatctttcacgcacacgagcaaaaataacctatccagcccgtttccagcttgttgcggcgatgaatcccagccctaccggacattatcagggaaaccataaccgctgcacgccagaacagacattacgttatctcaaccggctctcggggccctttctcgaccgcttcgatctctcactggagatcccattaccaccccccggcattttgagtaaaacggtagtgccgggagaaagcagcgccaccgttaaacaacgcgtaatggccgccagagagcgccaatttaagcggcagaataaactgaatgcctggctggatagtccggaaatacgccaattctgcaaacttgagagcgaagatgcgatgtggttggaaggaacactgatccatctggggttatcgattcgtgcctggcagcggttattgaaagttgcacgaaccattgctgatattgatcagtctgacattatcacacgtcagcatttgcaggaggcagttagctatcgagcgattgaccgtttgctcatccatctgcagaaactactgacataaaaaaagggcatttcgccctttttattaatcgtcagaatcggtgtagtcttcagcaccttcaacctgcggtttaccgccggaaagggtgtgaaaacgttttggacgcttaatacgcgtcatatacttggaccacacgcgttctgcttctgtcactggctcacgttcgccacggcatactgctacgaagagtttctcttcctcggtaaccggctcgcgtttgccaagatccaactcattgaaggcataaccatgacgctcaagcagttgtgcctctttgatggtgaaatcaccatgacgagagaatccacgtggataatgtttattgtcgaaatatcgattagtcgtcgtaaagctttccgccatcctgcacgctcctaattctttgaccgagctagttatggcgcggagtattagttacgcttgacagagtgtaaaacaaaacatttaaatcataacgacaaataattttgcggagagcactgtggatacggaattgttaaaaactttcctggaagttagccgaacgcgtcactttggtcgagcggctgaatcgctctatctgacccagtcagcagtgagctttcgaatcagacaactggaaaatcaactgggtgtgaaccttttcacccgccacagaaacaatatccgtttaaccgctgccggtgaaaaactactgccttatgcagaaacgctcatgagcacctggcaggccgcccgtaaggaggtggcgcatacctcacgacataacgagttttctatcggtgccagcgcctcgttgtgggaatgtatgcttaatcagtggctgggacgcttgtatcaaaatcaggatgcccatacaggcttacagttcgaagcgcgaattgcccaacggcagtctctggtaaaacagctgcatgaacgccagcttgatcttcttattaccactgaagcgcccaaaatggacgaatttagtagtcagttgctgggatatttcactttagcgctttataccagtgccccttcaaaactaaagggagatcttaattatctgcgacttgagtgggggccagattttcaacagcatgaggcaggtttgatcggtgctgacgaagtgcccattctgacaaccagttctgctgaactggcacagcaacagattgcgatgcttaatggttgcacctggctacccgtcagctgggcgcgtaaaaaaggcggcctgcataccgttgtcgatagcacaacactttcacggccgctttatgccatatggctgcaaaatagcgataaaaatgcgttgattcgcgatcttttgaaaattaacgtgctggatgaagtgtattaatatgaatggctggcaaggatgccggtagaaggatttacttcggagagggttatttcagataaaaaaaatccttagctttcgctaaggatgatttctggcaggggcggagagactcgaactcccaacacccggttttggagaccggtgctctaccaattgaactacgcccctaattagggtggcggaacggacgggactcgaacccgcgaccccctgcgtgacaggcaggtattctaaccgactgaactaccgctccaccgaattcttttacaaccaccggttttatgaccggcttactgcttaatttgatgcctggcagttccctactctcgcatggggagaccccacactaccatcggcgctacggcgtttcacttctgagttcggcatggggtcaggtgggaccaccgcgctacggccgccaggcaaattctgtttcatcagaccgcttctgcgttctgatttaatctgtatcaggctgaaaatcttctctcatccgccaaaacatcttcggcgttgtaaggttaagcctcacggttcattagtaccggttagctcaacgcatcgctgcgcttacacacccggcctatcaacgtcgtcgtcttcaacgttccttcaggactctcaaggagtcagggagaactcatctcggggcaagtttcgtgcttagatgctttcagcacttatctcttccgcatttagctaccgggcagtgccattggcatgacaacccgaacaccagtgatgcgtccactccggtcctctcgtactaggagcagcccccctcagttctccagcgcccacggcagatagggaccgaactgtctcacgacgttctaaacccagctcgcgtaccactttaaatggcgaacagccatacccttgggacctacttcagctccaggatgtgatgagccgacatcgaggtgccaaacaccgccgtcgatatgaactcttgggcggtatcagcctgttatccccggagtaccttttatccgttgagcgatggcccttccattcagaaccaccggatcactatgacctgctttcgcacctgctcgcgccgtcacgctcgcagtcaagctggcttatgccattgcactaacctcctgatgtccgaccaggattagccaaccttcgtgctcctccgttactctttaggaggagaccgccccagtcaaactacccaccagacactgtccgcaacccggatcacgggtccacgttagaacatcaaacattaaagggtggtatttcaaggtcggctccatgcagactggcgtccacacttcaaagcctcccacctatcctacacatcaaggctcaatgttcagtgtcaagctatagtaaaggttcacggggtctttccgtcttgccgcgggtacactgcatcttcacagcgagttcaatttcactgagtctcgggtggagacagcctggccatcattacgccattcgtgcaggtcggaacttacccgacaaggaatttcgctaccttaggaccgttatagttacggccgccgtttaccggggcttcgatcaagagcttcgcttgcgctgaccccatcaattaaccttccggcaccgggcaggcgtcacaccgtatacgtccactttcgtgtttgcacagtgctgtgtttttaataaacagttgcagccagctggtatcttcgactgatttcagctccacgagcaagtcgcttcacctacatatcagcgtgccttctcccgaagttacggcaccattttgcctagttccttcacccgagttctctcaagcgccttggtattctctacctgaccacctgtgtcggtttggggtacgatttgatgttacctgatgcttagaggcttttcctggaagcagggcatttgttgcttcagcaccgtagtgcctcgtcatcacgcctcagccttgattttccggatttgcctggaaaaccagcctacacgcttaaaccgggacaaccgtcgcccggccaacatagccttctccgtccccccttcgcagtaacaccaagtacaggaatattaacctgtttcccatcgactacgcctttcggcctcgccttaggggtcgactcaccctgccccgattaacgttggacaggaacccttggtcttccggcgagcgggcttttcacccgctttatcgttacttatgtcagcattcgcacttctgatacctccagcatgcctcacagcacaccttcgcaggcttacagaacgctcccctacccaacaacgcataagcgtcgctgccgcagcttcggtgcatggtttagccccgttacatcttccgcgcaggccgactcgaccagtgagctattacgctttctttaaatgatggctgcttctaagccaacatcctggctgtctgggccttcccacatcgtttcccacttaaccatgactttgggaccttagctggcggtctgggttgtttccctcttcacgacggacgttagcacccgccgtgtgtctcccgtgataacattctccggtattcgcagtttgcatcgggttggtaagtcgggatgacccccttgccgaaacagtgctctacccccggagatgaattcacgaggcgctacctaaatagctttcggggagaaccagctatctcccggtttgattggcctttcacccccagccacaagtcatccgctaatttttcaacattagtcggttcggtcctccagttagtgttacccaaccttcaacctgcccatggctagatcaccgggtttcgggtctataccctgcaacttaacgcccagttaagactcggtttcccttcggctcccctattcggttaaccttgctacagaatataagtcgctgacccattatacaaaaggtacgcagtcacacgcctaagcgtgctcccactgcttgtacgtacacggtttcaggttctttttcactcccctcgccggggttcttttcgcctttccctcacggtactggttcactatcggtcagtcaggagtatttagccttggaggatggtccccccatattcagacaggataccacgtgtcccgccctactcatcgagctcacaatatgtgcatttttgtgtacggggctgtcaccctgtatcgcgcgcctttccagacgcttccactaacacacatactgattcaggctctgggctgctccccgttcgctcgccgctactgggggaatctcggttgatttcttttcctcggggtacttagatgtttcagttcccccggttcgcctcattaacctatggattcagttaatgatagtgtgtcgaaacacactgggtttccccattcggaaatcgccggttataacggttcatatcaccttaccgacgcttatcgcagattagcacgtccttcatcgcctctgactgccagggcatccaccgtgtacgcttagtcgcttaacctcacaacccgaagatgtttctttcgattcatcatcgtgttgcgaaaatttgagagactcacgaacaactttcgttgttcagtgtttcaattttcagcttgatccagatttttaaagagcaaatatctcaaacatcacccgaagatgagttttgagatattaaggcaggtgactttcactcacaaaccagcaagtggcgtcccctaggggattcgaacccctgttaccgccgtgaaagggcggtgtcctgggcctctagacgaaggggacgtatcagtctgcttcgcaagacgccttgcttttcacttcctatcagacaatctgtgtgagcactgcaaagaacgcttctttaaggtaaggaggtgatccaaccgcaggttcccctacggttaccttgttacgacttcaccccagtcatgaatcacaaagtggtaagcgccctcccgaaggttaagctacctacttcttttgcaacccactcccatggtgtgacgggcggtgtgtacaaggcccgggaacgtattcaccgtggcattctgatccacgattactagcgattccgacttcatggagtcgagttgcagactccaatccggactacgacgcactttatgaggtccgcttgctctcgcgaggtcgcttctctttgtatgcgccattgtagcacgtgtgtagccctggtcgtaagggccatgatgacttgacgtcatccccaccttcctccagtttatcactggcagtctcctttgagttcccggccggaccgctggcaacaaaggataagggttgcgctcgttgcgggacttaacccaacatttcacaacacgagctgacgacagccatgcagcacctgtctcacggttcccgaaggcacattctcatctctgaaaacttccgtggatgtcaagaccaggtaaggttcttcgcgttgcatcgaattaaaccacatgctccaccgcttgtgcgggcccccgtcaattcatttgagttttaaccttgcggccgtactccccaggcggtcgacttaacgcgttagctccggaagccacgcctcaagggcacaacctccaagtcgacatcgtttacggcgtggactaccagggtatctaatcctgtttgctccccacgctttcgcacctgagcgtcagtcttcgtccagggggccgccttcgccaccggtattcctccagatctctacgcatttcaccgctacacctggaattctacccccctctacgagactcaagcttgccagtatcagatgcagttcccaggttgagcccggggatttcacatctgacttaacaaaccgcctgcgtgcgctttacgcccagtaattccgattaacgcttgcaccctccgtattaccgcggctgctggcacggagttagccggtgcttcttctgcgggtaacgtcaatgagcaaaggtattaactttactcccttcctccccgctgaaagtactttacaacccgaaggccttcttcatacacgcggcatggctgcatcaggcttgcgcccattgtgcaatattccccactgctgcctcccgtaggagtctggaccgtgtctcagttccagtgtggctggtcatcctctcagaccagctagggatcgtcgcctaggtgagccgttaccccacctactagctaatcccatctgggcacatctgatggcaagaggcccgaaggtccccctctttggtcttgcgacgttatgcggtattagctaccgtttccagtagttatccccctccatcaggcagtttcccagacattactcacccgtccgccactcgtcagcgaaacagcaagctgtttcctgttaccgttcgacttgcatgtgttaggcctgccgccagcgttcaatctgagccatgatcaaactcttcaatttaaaagtttgatgctcaaagaattaaacttcgtaatgaattacgtgttcactcttgagacttggtattcatttttcgtcttgcgacgttaagaatccgtatcttcgagtgcccacacagattgtctgataaattgttaaagagcagtgccgctttgctttttctcagcggcgcggggtgtgcataatacgctttcccgctacagagtcaagcatttatttttgctttctctgccggagttctcaggagaaccccgctgacccggcggcgtgtttgccgttgttccgtgtcagtggtggcgcattatagggagttattccggcctgacaagaggaaatttaaaataattttctgaccgcgcattttttcagcaaaagccccgttaatgtgccataaaacaagcaatttgccgtttttgcaaccgtaatcacacttcctggtggcatactaaggaggaataaaaagaaaaaggaagataagtaatgcctttaagcgcacaacagttagctgcacagaaaaacctttcgtatgttctggctgagaagctggcgcaacggatcttaaaaggtgaatatgaacccggcaccattttgcccggtgagattgagctgggcgagcaatttggagtgagtcgtacagcggtacgcgaagcggtcaaaacgttaacggcaaaagggatggttttaccgcgaccgcgaattggtactcgggtcatgccacaatcgaactggaattttcttgatcaggaattgcttacctggtggatgacagaagagaactttcatcaggtcatcgatcactttctggttatgcgtatctgtctggagccgcaagcctgcctactggcagcaacggttggcaccgcggaacagaaagcgcatctcaatacgttaatggccgaaatggcggcattaaaagagaactttcgccgtgaacgctggatcgaagtcgatatggcctggcatgagcatatctatgaaatgagcgccaatccgtttttgacctcattcgcctcgctattccattcggtttatcacacttacttcacgtcaattaccagcgacacagtgataaagctggatctgcatcaggcgattgtcgatgcgattatccaaagcgatggcgacgcggcatttaaagcttgtcaggcgctgctacgctcacctgataagtgataacccgataacaggacattgaatgagcgataaaaagaagcgcagtatggcgggtttgccgtggatcgcggcgatggccttcttcatgcaggcacttgatgccactattcttaataccgccttacccgcaatcgctcatagccttaatcgttctcctctcgcgatgcaatcagccatcatcagttatacgctgacggtggcgatgcttattccggtaagcggatggctagccgatcgcttcggtacgcgtcgcatttttacccttgccgtgagtctgttcacattgggttctctggcctgcgcactttctaattcgctaccacagctggttgtcttccgggttattcaggggataggcggcgcaatgatgatgcctgttgctcggctggccttactgcgcgcttatcctcgtaatgaacttcttccagtattgaattttgtcgccatgccgggtctggtggggccaattttaggccccgttcttggcggcgtgctggtcacctgggcaacctggcactggatatttttaatcaatatccccataggtattgcgggccttctttacgcgcgcaaacatatgcccaatttcaccaccgcacgacgcagattcgatatcactggctttttgctgtttggcctcagccttgttctcttctcaagcggaatagagctattcggggaaaagattgtcgccagctggattgccttgacggtaattgtcaccagcatcgggttactgcttctctatattctccatgcacgacgcacgccaaacccattaatttcattagatttatttaaaacccgcactttctcgatcggtatcgtaggcaatattgcaacccgtctggggaccggctgtgtaccgttccttatgccattgatgttacaggtaggatttggttatcaggcgtttattgctggctgtatgatggcaccgacagcgttaggttccattattgcaaaatcgatggttacccaagtcttacgtcgtctgggctatcgccatacgttagtggggatcacggtgattattgggctaatgatcgctcagttctctttgcaatcaccagcaatggctatatggatgctgatcttgccgttgtttatattagggatggctatgtcgacgcagtttaccgcgatgaataccatcacacttgccgatctgaccgatgacaatgccagcagcggtaacagtgttctggcggtcacgcagcaactgtcgattagtttaggcgttgctgtaagtgcggccgtccttcgcgtttatgaaggaatggaaggcacaacgactgtcgaacaattccactatacgtttatcacaatgggcattattactgttgcttcagcagcaatgttcatgcttctgaaaacaaccgatggtaataatttgatcaaaagacagcgtaaatctaagccgaaccgcgttccatcagaatcggagtaagttgtaatcgttgttgctgaagggtcggctgggttatccgatggatgagtacatcaatcgccagctcccccagttcatctttcggttggtggatagtggttaatggtggcgtcataaagcttgccagttcgatatcgtcatagccaatcaccgcgatatcctgcggaacctgtaactctgcctgatataacgcctggtaaacgccaacagccatagcgtcatttccggtaaagacggcctgaggacgcagcggatgtgatagcagttggcgcatagcgtcaaacccgccgttaaattcaaaatcaccagtgacttcatagccatcaggaatgttgagacccgcacgtttcatcgccgcccgataaccttccaaccgcaggcgcgccggagttttatccagcgggccggtaatacaggcgatacgggtatgacctttatcgatcagatattgcgttgctaagtctccgcccagcaacgagttatcctgaataagatcgctgtcgccatcgaacggagcccagtccatcatcacagtaggcactgtcggataacgttgcatgatttcacgcgaaggttgatgcgtttcggtgcacagtaacagcaagccatcaacgcgtttttgcatcagcgtttccagattgcgattcatccgctgttcatcgccttcggtattgcaaaggacgagactataaccgcgttcgaagcagctgcgttcaacgccacgcaccagttctgaatagaaaggattggtactggcagtgatcaacatgccaatggtatgtgtttgattgagtttgaggctacgcgccagagctgatggcgcgtaattgagttctttaatcgccgcttcaactttggcggtaatcgcttcactgacgaagcgatctttattgataacgtgagaaactgttgaggtagaaacgcccgccaggcgggcaacatctttcattgtagccaagcgtcacctctgcctgtctaaaaatgcgtcgatctcttcacgccacggtacggaaggttgtgcgcctttacgtgttacggcaatcgcagcggcagcatgggcaaaacgaatcgcctctggcaatggtttttcttccagcaatgccgtgattaacgcaccgttaaaggtatctccggcagcaatggtatcgacagcctgcacccggaatccaggaacgcgctgaccttcaccattcacgctagcccatacaccacgacttcctaaagtaatcagtacagtacggatacctttttcatgcagtacctgcgccgccttcgctgcatcttcatcattttcaacacgaataccggtgagcttttctgcttccgtttcgtttggcgtaataatgtccaccagcgccagcagttcgtcaggaagttcgcgagccggagccgggttaagcgcaacgatagtcttattttgatgggcgattttcgccgctgccatcacactttcgagtggtgattccagctgcattaataatgctgacgcgttggcaatacgctcacgttgcgcttccaccagcgccggggaaagggcagcattagcgccggcatgaataccgatgacattctcaccttcgccattaacaaaaatcagcgccacacctgttgattcgcctttgatcacgctgaccggagtaatatcaatgttatcagtggcgagctgctggcgaacgctctcaccaatgctgtcatcacccgtacaggcaataaacgcgatattcgcaccgctacgcccagcagccacagcctgattcgcgcctttgccgccaaatgcaacctgatagtggttaccggttacggtttcgcctggagtaggaaaagattgaagattaagaatgtggtcagcattaatgctgccaagaacaacgaggctgcctgcgttttgcatattcgggatgtccataaaatgcgccaccgtgttagggtggcgcgtgccctgcttttctttatattacacgttcatctgtcgatgacgtatttatgtcaccatcaggtcatacaacctgattaaaactactgcttaacaaccagtttcagatcaaccggatacttagcctgaactttctcgcctttcagcactttatctgcggtttcgacgcctttcgcgccaatctgatcgggtagctgagcgatagtcgctgctagtttgccatcattcaccgctttttcgccatccggtgtaccgtcaaatccgacgaccatcacatccgatttaccggcagtttgcagtgcgcgcagcgcgcccagcgccatttcatcattctgcgcgaatacagcctgaacatccggatgagcggtcaacaggttctgcattacgttcaaacctttaatgcgatcaaaatctgctggctggctggcaagaacattaaacttgtgagcagcaacggcctgctggaagccttcgccacgttcacgggctgcggatgtaccagcaatgccttgcagctcgataactttggcaccttcacccgctttcttcgcgatgtaatcaccagcgattttgccgcccagtacgttatcagaagcaatgtggctcaccacttcacctttcgttgcctggcggtcaagagtgataaccgggatgttcgcctggttagccatcttcacagcattacccactgcgtcggagtcggtcgggttaatcagcagaatttttgtgccgcgaacggttaagtcctgcacgttcgccagctctttcgccgggttgttctgggagtccagcaccaccaggttatagccaagtttatccgcctctttctgcgcgccatctttcagcgatacaaagaacgggttgttaagcgtggagaccaccagcgcgatggtgtcttttgccatcgcattcgcactgacggtggcgcttagcgcaacagcggaaaccagggtagccagttttttcatgttcatattcaagatgtcctgtagtcgttattactgctttttgttgtctaccagcaccgccagcaaaatcaccaccgctttgacgatcatctggtaataggaggaaacacctaacaaattcaatccattattaaggaagccaagaattaatgcgccgatcaacgtcccaacaatgcgaccttttccgcccgccagactcgtaccgcccagaaccaccgcagcaatagcatccagctcatagccagtccccgccgtgggttgtgcggaggagagacgcgccacttcaatgatcccggccagcgatgccagcagaccacaaagagaatagacgatgattttgattttattgacgttgataccagaaagacgcgttgccgcttcgttgccgcccagcgcgtagatgtaacgccccagacgcgtgtgatgcagcatgtaccaggccgcgaggaagacaatccccatgatccagactggcgtcggtacgcccagcggacgaccaataccaaaccagccaaacagatcggcgttctcagtaaagccggtattcactgggctaccgttggtataaaccatggtcacgccgcgcagtaaaagcatcataaccagcgtagcgataaacgcctggacgcgacctttcgctacaatcaccccggttaccgcaccaattgcggcacctaacgcgagagcagcagcgacagccaccagcgcattgacttcaatgccgacgatagatgcagcaactgcgccggtcagcgccaacagagaacctaccgataagtcgatgcccgacgtcaggatcaccagcgtcatcccgaccgccataatggcgttcactgaggtttgctggagaatattgaataagttattgatggtgaaaaagttcgggcttaacgtcgagacaatcgcgatcagcaccagcagagcgataagcgatttctgctccatcagccacgctttcgtgaaataacggcgaccagagacagtctgggttgtcatttttttactcctgattcacgcgattaagcttgcccacagcggcagccattaacacttcctgggtggcctgctcacgagtaaattccccgctgagatgcccttcatgcatgacgatgatgcgatcgctcatgcctaatacttctggcatctccgatgacaccagaatgatgctcaagccatcggctttgaactggttaatcagttgatagatctcttttttcgcgccgacatctacgccacgggtaggttcatcaaggatcaacactttggggcgtgtcatcagaccgcgggcaatcgccactttttgctgattgccaccggaaagcagaccaattgcctgttccatcgacggagttttcacattaaacagacgaatgaaatcactcacagcctgctgttcatcggcatgcttcaaactgccgccagcgcggctgaagtagcgcagcgctgtcagcgacatgttctcttttactgacatgcccaacactaaaccgtcacgtttacggtcttcggagatatacacaatgccgtttgccaggccatcctgcggtgaacgggtaacgacttcatgcccatccagggtgacgtaaccgctggtgcgcggtagtgcgccgtagagcactttcatcagttcggtacgacctgcgcccatcaaaccagagacgccaagaatttcgcctttgcgtaaagtaaaagagacatcgttaacgccaggtccgcagagattatcgactttcaggcggatatctcccggcgctttgtccaggtgcggatattgatcttccagcttgcgacccaccatcatctcaatcagcgaatcttcggtcagtgatgccacttcgcgctcagcaataaattgcccatcacgaaaaacggtaacgtcatcgcaaatctcgaagatttctttcatgcggtgggagatatagacaataccgcggccttgcgatttcagctcgcggatgacgcggaacagggattcggtttcggtatcggtcagcgcatcggtcggttcatccataatgatgactttcgactcaaagctcagcactttggcgatttcaaccatttgctggtcaccgatggaaagatcgcccaccagcttgtcgcttttaaagcgcaggttaagtttagccagcaatttatccgcttcggcatacatggttttccagtcaattttgccaaagcgattaacaaactcacgaccgaggaaaatgttttcggcaatggtcaactgcgggatcaggttcagttcctgatggataatcccaatcccggcttcctgggaagattttggcccggtaaatgtcgtttctttccccagccataaaagcgtaccggcatcgcgagtatagatgccagtaagcactttcatcatggtggatttacccgcgccgttttcgcccaccagcgccatcacgcggcccggatagacatttaacgctgcgcccgagagggcttttacgcccgggaaggctttatcgatgcctttaagctgaagtaatgcttccatgacggcctcagaacgtcacgccagcacagagaatgatattcgcatacggagaacattctccgctgcgaattaccgcctgactttctgcggtttgttgtttgaattgttcatgcgtggtgtaacgaatttcaatggtatttccctggtgtttttgcagctgctcaaggtgagtgagcaacgtttcgtggagttgcggattatggtgtttgatctcttccgcgataatggccgcctcgacctgcatttcatttgtgacgacgcccagcacctgcataaaagaaggtacaccctgggttaatgccatatcgatacgcgttgtacttttggggatgggtaaaccagcatcacacaccaccagcgtatcggtatgtcccagacgggagatcaccgatgaaatatcagaattaagaacggtgccttttttcatttttttctccatcagcgaaacgtttcgctgacccacagtttaatcctgactgagttgggaaaaccatcgtgacgttacggaaatgtgatcaacctcgaaacgttttacatggtgattaaccatgaaaacaaaaacgcccccttatgaagaaaggaggcgtctggcgttagatttcgacctgagtacccagttcgataaccctgtttggcgggatttcaaattgatctggtgcacgcagcgcattacgttgcagcagcaagtacagcttgccgcgcagacgcaaataccacgggcgtttgccgaggatcaacgactcatgcgacataaagaaggaggtttccatcatccggcaacttaatccttccagaccgcagcggtggaaaacttcttctacgtttggcgtttctcgccaaccataacttgccaccacgcgccagaaagtgggcgacagttgttcaatctgtacccgacggacgttatggacatatggagcgtcttcggtgcgcagagttaacagaatcacccgctcatgcaataccttgttatgtttaaggttatgcatcagcgcaaagggaatgacgttgattgcacgcgacatatacaccgcggtcccgggcacgcgaacaggcggtgatttctccagcgaagcaatcatcgcttccagagagttaccatgttcatgcatccgccgcagcaagcggaaacgctcgctcttccaggtggtcatcacgataaacatcacagtaccgaggctcaatggcaaccagccgccggagagcagtttatcgaggttagcggtgaacaatggaatatcgacacaaaggaaagcaatcaggatcagcgcaacaaaatacttattccagtgccagttctgacgtgccacggtagtcgagagaatagacgtcagcaccatggttccggtcaccgcaatcccgtacgccgccgccaggttgctggagtgctcaaagctgacaatcacaatcacgaccgcgacatagagcatccagttcacaaacggaatatagatttgccctgactccatttcggaggtgtgaataatgcgcatcggcgacaaatatcccagacgtaccgcctgacgcgtcaatgagaagacgccagagataaccgcctgcgaggcaattaccgtcgccagtgcggcgatgatcagcagcgggatcagcgcccagtccggtgccaacaggaagaacgggttcttaatcgcttccgggttctttaacaacagcgctccctgaccgaagtaattaagggtcaaggaaggtaatacgacggtgaaccacgccaggcgaatagggaacttaccaaagtgccccatatcagcatacagcgcctcgacccccgtaatcgacaacaccactgcccctaatgcaataaaagaaaccgttttgtattcaaggaagaaatgcaccgcccacattggattcagcgcatgcagcacttccgggttagcaataatgctacgtaaccccagtcctgccagaatcaaaaaccaggtcagcatgatcggcgcaaacagcttaccgaccatagccgtgccatgtttttgaatcataaataataaagtgagaacgataattgagaggggaactatccaggtatccagctgcggggcgacgatttccagaccttcaatggctgacatcaccgaaatagcgggtgttatgacgacttcaccatagaaaaagctgccgccgattagccccataatcaccagcattgatgtggttcgcgccgacgtattacgcccggcaagcgacatcaacgtcaggatccccccctcaccggcgttatctgcccgcatcacgaaggtgagatatttaatggaaaccacaaagattagcagccagaagatcagcgataaaaagccaaacacggcatcgcgttcaacgccaaaaccaaactggccggacaaacattcacgaagtgtatataacgggctggtaccaatatcgccgtagacaactccaatcgccgcgagggtaatcgcgggcaatgattgcttattatcagtgctcatagactagtctttcgttgaaatatgaaatgtgtgcttagtcccttggcccacaaaaaagcgcacagtatgcacgattaacggcaaaatcgtactcctaaatgcggccacattaacctggctcaaagaaaaataccccccctttgagactattttagccaccagcaagaaacgtctatactcgcaatttacgcagaacttttgacgaaaggacgccacttcattatggctcaccctcatttattagcggaaagaatttcccgcctgagcagttcgttggaaaaggggctttatgaacgtagccacgccatccgcttgtgtttattagcggcattaagtggtgaaagtgtgttcctccttggcccgccaggtattgccaaaagtttgatcgcccggcgcttaaaattcgcctttcagaatgcccgcgcgtttgaatatctgatgacccgcttctccacgccggaagaagtttttggtcccctttctattcaggcgctaaaagatgaagggcgctatgaacgtttaaccagcggttacctgccggaagcagaaattgtctttctggatgagatctggaaagcgggcccggcaattcttaataccttgctcaccgccattaacgagcgccagttccgcaacggtgcacacgtagaaaaaatcccgatgcgtctgctggtggcggcctccaacgagctgccggaagcagacagcagtctggaagcgttatatgaccgcatgctgattcgtctgtggttagataaagtgcaggataaagcgaatttccgctccatgctgaccagtcaacaggatgaaaacgacaatccggttcctgatgccttgcaggtcacagatgaagaatatgaacgctggcagaaagagattggtgaaattacgctgcccgatcatgtatttgagctgatttttatgctgcgccagcaactggataaattaccggatgcgccttatgtctcggatcgtcgctggaaaaaagcgatccgattattgcaggccagcgccttttttagcggtcgcagtgctgttgccccggtagatctcattttgctgaaagattgcctgtggtatgacgcgcaaagcctgaatttgatacaacaacaaattgatgtattgatgaccggtcacgcctggcaacagcaagggatgttgactcgccttggcgcgattgtgcaacgtcacctgcaactccagcagcaacaaagcgataaaacagccttaacggtaattcgtctgggcggcattttcagccgtcgtcagcagtatcaacttcctgttaacgttactgcttccactctgactctactgctgcaaaaaccgttaaaactgcatgatatggaagtggttcatatctcctttgagcgtagcgcgctggaacagtggctgagcaaaggtggtgaaattcgcggtaaactgaacggtatcggctttgcccagaaactgaatctggaagttgatagcgcccaacatcttgtcgttcgcgatgtaagtttacaaggcagtacgctggcacttcccggttcatcggctgaaggtctgcctggtgaaataaaacaacaactggaagagcttgaaagcgactggcgcaagcaacacgctttattcagcgaacagcaaaaatgtctgtttatccctggcgactggttaggtcgcattgaagccagcctacaggatgtcggtgcacagattcgccaggcacaacaatgctaacgctggatacgcttaatgtgatgctggccgtcagcgaagagggattgatcgaagagatgatcatcgcactgctggcctcaccgcagctggcggtcttctttgaaaaattcccacgcctgaaggcggcaatcactgatgatgttccccgctggcgtgaagcgctgcgcagtcggctgaaagatgcccgagtcccgccggaactcaccgaagaggtgatgtgctatcagcaaagccagctcctctccacgccacagtttattgtgcagctaccacagatcctggacttactgcatcgtctgaattctccatgggcagaacaagcccgacagttggttgatgctaacagcacgatcacttcagcgttacacacgctttttctccagcgttggcgtttaagtctgatcgtgcaagcaacgacgttaaatcaacagctattagaagaagaacgcgaacaactgttgagtgaagttcaggaacgcatgacgctgagcggacaacttgaaccgattctcgcagataacaatactgcagctggtcgtctgtgggatatgagcgccggtcagcttaaacgtggcgactatcagttgattgtgaaatacggtgaatttcttaacgaacagccggaactgaaacgcctggcagagcagctggggcgttctcgggaagccaaatcaataccgcgcaacgatgcgcagatggaaaccttccgcaccatggtgcgcgaaccggcgacggttcctgagcaggttgatggtctgcaacaaagcgatgatattttacgtctcctgccgccagaactggcgacactagggataacggaactggagtatgagttttaccgtcggctggtggaaaaacagttgctcacctatcgcctgcacggtgagtcgtggcgtgaaaaagtgatcgaacgtccggtggtacataaagattacgatgaacagccgcgcgggccgtttattgtctgtgtggatacttccggctcaatgggcggctttaatgaacagtgtgcgaaagcgttctgcctggccttgatgcgcattgctctcgcagaaaaccggcgctgctatattatgctattttccaccgagatcgtccgttatgagctttcaggcccacaaggcatcgaacaagcaatccgttttttaagccagcagtttcgtggcggcaccgatcttgccagttgttttcgcgccattatggaacgcttgcaaagcagggaatggtttgatgccgatgcggtggtgatttctgattttatcgctcagcggttgcctgacgacgtgacgagtaaagtgaaagagctgcagcgggtacatcagcatcgctttcatgccgtggcgatgtcggcacacggcaaacccggcatcatgcgcattttcgatcatatctggcgctttgataccgggatgcgaagccgcctgctcagacgctggcggcgataaattattacagcagagaagggacgctctcgcgaacagcagctggccatactccacactgaacctggccgatatgcggcagttgcagcagcagcatagtcaaacgagactggccgataccgccgccgatggtctgcggcatttcaccgcgcagcagcgcctgatgccactccagctccaggcgatcttcgtcaccggtcagcgccagttgatgcttcagcgtgtcggcatctacacggatccccatggaggaaagctcaaacgcatcttccagtaccgggttccacaccagaatatcgccgttcagacccgcatggcccagctctgacggggtgctccagtcatcataatccggtgcgcgcacgtcgtggcgatgaccatcgctcagcttgccgccaatcccgacaaggaataccgcgccaagatctttcgctatcgcccgctcacgccctttggcatcaagatccggataacgagacagtaactcctggctgtgtacgaagtggatctgatccggcaggaacggtgccaggccaaactcttcgctaaccgcagcttcggttgctttaattcccgcccagatcgcctctaccgtgcttttcagagtcgagaattgacgctcaccgtcgcccattacgcgttcccagtcccactggtcaacatagaccgagtgcaacggagaaagacggtcttcatcggggcgaagggctttcatgtgcgtgtacagcccttcgcccgcgctgaagtcgtgttgccctaaggtctgacgtttccacttcgccagtgaatgaaccacttcgaactgggcatcaggcagagctttcacttttacctgcaccgctttttcacagcccgacaagttatcctgcgtgccatcccccacacggctaagaatcggcgcctggacttcgatcagccccagacgttcttccagttgacgagaaaagtgagatttcacgaagctaatttgacgttgtttggcaatgtaagcggttttcattttttatactcctgcgtcctgttgcttatgattaagcaacaaaaaccgacacacatgcaataatcattcaataaaaagcctaactcacttttgattcattaaaaaagaaggctaaaatagaatgaatcatcaatccgcataagaaaatcctatggaaaattatctgatcgacaatctggaccgtggcatcctggaagcattaatgggcaatgcgcgcaccgcttacgccgaactggcgaaacaatttggcgtcagtccggggacgattcacgttcgagtagagaaaatgaagcaggcggggatcattaccggggcgcgtattgatgtcagcccgaagcagctcggttatgacgtaggctgctttatcggcattatattaaagagcgccaaagactacccttccgcgctggcaaagctggaaagccttgatgaagtcactgaagcctattacacaaccggccactacagcatctttataaaagtgatgtgccgttcgatcgacgctctccagcatgtacttatcaacaagatccaaacaattgatgaaattcagtccaccgagacattgatcgtcctgcaaaacccgatcatgcgtaccatcaagccctgatcggcttttttaatcccatacttttccacaggtagatcccaacgcgttcacagcgtacaatacgccactcttaataaaggtggcggtttatggcagatatcactcttatcagcggcagcaccctcggcggtgccgaatatgtagcagaacacctggctgaaaagctggaagaggcgggttttaccaccgaaacgctgcacggtccgctgttagaagatttacctgcctcagggatctggctggttatcagctccacccacggtgccggagatattccggacaacctttctcctttctatgaagcattgcaggaacagaagcccgatctttctgcagtccgctttggcgcaatcggtattggcagtcgtgaatatgacaccttttgtggggctatcgataaactcgaggcagaactcaaaaattccggtgcaaaacagacaggcgaaacactgaagatcaacattcttgatcacgacattccggaagatccggcagaagaatggctgggatcgtgggttaatttactcaaataagtatacagatcgtgcgatctactgtggataactctgtcaggaagcttggatcaaccggtagttatccaaagaacaactgttgttcagtttttgagttgtgtataacccctcattctgatcccagcttatacggtccaggatcaccgatcattcacagttaatgatcctttccaggttgttgatcttaaaagccggatccttgttatccacagggcagtgcgatcctaataagagatcacaatagaacagatctctaaataaatagatcttctttttaatacccaggatcccaggtctttctcaagccgacaaagttgagtagaatccacggcccgggcttcaatccattttcataccgcgttatgcgaggcaatcaccatgttttatccggatccttttgacgtcatcatcattggcgggggtcatgcaggcaccgaggccgcgatggccgcggcgcgtatgggtcaacagactctgcttttgacacacaatatcgacactctggggcagatgagctgcaacccggcgatcggcggtattgggaagggacatctggtaaaagaagtggatgcactcggcggtctgatggcgaaagcgatcgatcaggcgggtatccagtttaggatactaaacgcaagcaaaggaccggcggttcgcgctacccgagctcaggcggatcgtgtgctctaccgtcaggcggtacgtacggcgctggagaaccaaccgaacctgatgatcttccagcaggcggttgaagatcttattgtcgaaaacgatcgcgtggtcggtgctgttacccaaatgggactgaagttccgtgccaaagccgtcgtgctcaccgttgggacgttcctcgacggtaaaattcatatcggtctggataattacagcggtggccgtgctggtgatccgccgtccattccgctttctcgccgtttgcgtgaactgccgctgcgcgttggtcgtctgaaaaccgggacaccaccgcgtattgatgctcgaaccatcgactttagcgtactggcgcaacagcatggcgataacccaatgccggtattctcgtttatgggcaatgcgtcccagcatccccagcaggtgccgtgttatatcactcataccaacgagaaaacccatgatgtgatccgcagtaacctcgatcgtagcccaatgtacgcaggggtgatcgaaggtgtcggcccacgctactgcccgtcgatcgaagacaaagtcatgcgcttcgccgacagaaatcagcatcagatcttccttgaaccggaaggactgacctctaatgaaatttatccgaacggtatctccaccagcctgccgttcgatgtgcagatgcaaatcgtccgctctatgcaggggatggaaaacgcgaagatcgtgcgtccgggttatgccattgagtatgacttcttcgatcctcgcgacctgaaaccgacgctggagagcaagtttatccaggggctgttctttgctggtcagattaacggcactaccggttacgaagaagccgctgcgcaaggtttgctggccggtcttaacgctgcccgtctgtctgctgacaaagaaggttgggctccggcacgttctcaggcgtatctcggcgtactagttgatgacctgtgcactttaggaaccaaagaaccgtatcgtatgtttacttcgcgcgcagaatatcgtctgatgctacgcgaagataatgcggatctgcgtttgactgaaatcggtcgtgaactgggcctggtggatgacgaacgttgggcgcgctttaacgagaaacttgagaatatcgagcgtgagcgtcagcgtctgaaatcgacctgggtaaccccgtcggcggaagctgcagccgaagtgaatgctcacctgactgcgccgctttcccgtgaagccagtggtgaagatctgctgcgtcgtccggaaatgacttatgaaaaattaaccacgctgacgccgtttgcccctgcgttgacagacgaacaggcggcggaacaggttgagattcaggttaaatacgaaggttatatcgcgcgccagcaagatgagatcgaaaagcagctgcgtaacgagaacaccctgctacccgcgacactggattaccgccaggtatccggtctttctaacgaagtgatcgccaaacttaacgatcacaaaccagcctctatcggccaagcttcgcgtatttctggcgtcacgcctgcggccatctccattctgctggtgtggctgaaaaaacagggtatgctgcgtcgtagcgcataacgcattaaaaatgcctggtaagcacccgcttaccaggcaacgcatcaagaacaggtaatcaccgtgctcaacaaactctccttactgctgaaagacgcaggtatttcgcttaccgatcaccagaaaaaccagcttattgcctacgtgaatatgctgcataaatggaacaaagcgtacaacctgacttcggtccgcgatcctaatgagatgctggtacgccatattctcgatagcattgtggtggcaccgtatctgcaaggtgaacggtttatcgatgtcggcaccggaccaggactgccaggcattccactctctatcgtgcgtcctgaagcccatttcactctgttggatagccttggtaaacgcgtgcgtttccttcgtcaggtgcaacatgagcttaaactggagaatattgaaccagtacagagcagggtagaagagtttccttcagagccgccatttgatggcgtaattagccgcgcttttgcctctctgaacgatatggtgagctggtgccaccatcttcctggtgagcaaggccgtttctacgcgctgaaagggcaaatgccggaagatgaaatcgctttgttgcccgaagaatatcaggtcgaatcagtggttaaacttcaggttccagccctggatggcgaacgtcatctggtggtgattaaagcaaataaaatttaatttttatcaaaaaaatcataaaaaattgaccggttagactgttaacaacaaccaggttttctactgatataactggttacatttaacgccacgttcactcttttgcatcaacaagataacgtggctttttttggtaagcagaaaataagtcattagtgaaaatatcagtctgctaaaaatcggcgctaagaaccatcattggctgttaaaacattattaaaaatgtcaatgggtggtttttgttgtgtaaatgtcatttattaaaacagtatctgtttttagactgaaatatcataaacttgcaaaggcatcatttgccaagtaaataaatatgctgtgcgcgaacatgcgcaatatgtgatctgaagcacgctttatcaccagtgtttacgcgttatttacagtttttcatgatcgaacagggttagcagaaaagtcgcaattgtatgcactggaaaaatatttaaacatttattcaccttttggctacttattgtttgaaatcacgggggcgcaccgtataatttgaccgctttttgatgcttgactctaagccttaaagaaagttttatacgacacgcggcatacctcgaagggagcaggagtgaaaaacgtgatgtctgtgtcgctcgtgagtcgaaacgttgctcggaagcttctgctcgttcagttactggtggtgatagcaagtggattgctgttcagcctcaaagaccccttctggggcgtctctgcaataagcgggggcctggcagtctttctgcctaacgttttgtttatgatatttgcctggcgtcaccaggcgcatacaccagcgaaaggccgggtggcctggacattcgcatttggcgaagctttcaaagttctggcgatgttggtgttactggtggtggcgttggcggttttaaaggcggtattcttgccgctgatcgttacgtgggttttggtgctggtggttcagatactggcaccggctgtaattaacaacaaagggtaaaaggcatcatggcttcagaaaatatgacgccgcaggattacataggacaccacctgaataaccttcagctggacctgcgtacattctcgctggtggatccacaaaaccccccagccaccttctggacaatcaatattgactccatgttcttctcggtggtgctgggtctgttgttcctggttttattccgtagcgtagccaaaaaggcgaccagcggtgtgccaggtaagtttcagaccgcgattgagctggtgatcggctttgttaatggtagcgtgaaagacatgtaccatggcaaaagcaagctgattgctccgctggccctgacgatcttcgtctgggtattcctgatgaacctgatggatttactgcctatcgacctgctgccgtacattgctgaacatgtactgggtctgcctgcactgcgtgtggttccgtctgcggacgtgaacgtaacgctgtctatggcactgggcgtatttatcctgattctgttctacagcatcaaaatgaaaggcatcggcggcttcacgaaagagttgacgctgcagccgttcaatcactgggcgttcattcctgtcaacttaatccttgaaggggtaagcctgctgtccaaaccagtttcactcggtttgcgactgttcggtaacatgtatgccggtgagctgattttcattctgattgctggtctgttgccgtggtggtcacagtggatcctgaatgtgccgtgggccattttccacatcctgatcattacgctgcaagccttcatcttcatggttctgacgatcgtctatctgtcgatggcgtctgaagaacattaatttaccaacactactacgttttaactgaaacaaactggagactgtcatggaaaacctgaatatggatctgctgtacatggctgccgctgtgatgatgggtctggcggcaatcggtgctgcgatcggtatcggcatcctcgggggtaaattcctggaaggcgcagcgcgtcaacctgatctgattcctctgctgcgtactcagttctttatcgttatgggtctggtggatgctatcccgatgatcgctgtaggtctgggtctgtacgtgatgttcgctgtcgcgtagtaagcgttgcttttatttaaagagcaatatcagaacgttaactaaatagaggcattgtgctgtgaatcttaacgcaacaatcctcggccaggccatcgcgtttgtcctgttcgttctgttctgcatgaagtacgtatggccgccattaatggcagccatcgaaaaacgtcaaaaagaaattgctgacggccttgcttccgcagaacgagcacataaggaccttgaccttgcaaaggccagcgcgaccgaccagctgaaaaaagcgaaagcggaagcccaggtaatcatcgagcaggcgaacaaacgccgctcgcagattctggacgaagcgaaagctgaggcagaacaggaacgtactaaaatcgtggcccaggcgcaggcggaaattgaagccgagcgtaaacgtgcccgtgaagagctgcgtaagcaagttgctatcctggctgttgctggcgccgagaagatcatcgaacgttccgtggatgaagctgctaacagcgacatcgtggataaacttgtcgctgaactgtaaggagggaggggctgatgtctgaatttattacggtagctcgcccctacgccaaagcagcttttgactttgccgtcgaacaccaaagtgtagaacgctggcaggacatgctggcgtttgccgccgaggtaaccaaaaacgaacaaatggcagagcttctctctggcgcgcttgcgccagaaacgctcgccgagtcgtttatcgcagtttgtggtgagcaactggacgaaaacggtcagaacctgattcgggttatggctgaaaatggtcgtcttaacgcgctcccggatgttctggagcagtttattcacctgcgtgccgtgagtgaggctaccgctgaggtagacgtcatttccgctgccgcactgagtgaacaacagctcgcgaaaatttctgctgcgatggaaaaacgtctgtcacgcaaagttaagctgaattgcaaaatcgataagtctgtaatggcaggcgttatcatccgagcgggtgatatggtcattgatggcagcgtacgcggtcgtcttgagcgccttgcagacgtcttgcagtcttaaggggactggagcatgcaactgaattccaccgaaatcagcgaactgatcaagcagcgcattgctcagttcaatgttgtgagtgaagctcacaacgaaggtactattgtttctgtaagtgacggtgttatccgcattcacggcctggccgattgtatgcagggtgaaatgatctccctgccgggtaaccgttacgctatcgcactgaacctcgagcgcgactctgtaggtgcggttgttatgggtccgtacgctgaccttgccgaaggcatgaaagttaagtgtactggccgtatcctggaagttccggttggccgtggcctgctgggccgtgtggttaacactctgggtgcaccaatcgacggtaaaggtccgctggatcacgacggcttctctgctgtagaagcaatcgctccgggcgttatcgaacgtcagtccgtagatcagccggtacagaccggttataaagccgttgactccatgatcccaatcggtcgtggtcagcgtgaattgatcatcggtgaccgtcagacaggtaaaaccgcactggctatcgatgccatcatcaaccagcgcgattccggtatcaaatgtatctatgtcgctatcggccagaaagcgtccaccatttctaacgtggtacgtaaactggaagagcacggcgcactggctaacaccatcgttgtggtagcaaccgcgtctgaatccgctgcactgcaatacctggcaccgtatgccggttgcgcaatgggcgaatacttccgtgaccgcggtgaagatgcgctgatcatttacgatgacctgtctaaacaggctgttgcttaccgtcagatctccctgctgctccgtcgtccgccaggacgtgaagcattcccgggcgacgttttctacctccactctcgtctgctggagcgtgctgcacgtgttaacgccgaatacgttgaagccttcaccaaaggtgaagtgaaagggaaaaccggttctctgaccgcactgccgattatcgaaactcaggcgggtgacgtttctgcgttcgttccgaccaacgtaatctccattaccgatggtcagatcttcctggaaaccaacctgttcaacgccggtattcgtcctgcggttaacccgggtatttccgtatcccgtgttggtggtgcagcacagaccaagatcatgaaaaaactgtccggtggtatccgtaccgctctggcacagtatcgtgaactggcagcgttctctcagtttgcatccgaccttgacgatgcaacacgtaagcagcttgaccacggtcagaaagtgaccgaactgctgaaacagaaacagtatgcgccgatgtccgttgcgcagcagtctctggttctgttcgcagcagaacgtggttacctggcggatgttgaactgtcgaaaattggcagcttcgaagccgctctgctggcttacgtcgaccgtgatcacgctccgttgatgcaagagatcaaccagaccggtggctacaacgacgaaatcgaaggcaagctgaaaggcatcctcgattccttcaaagcaacccaatcctggtaacgtctggcggcttgccttagggcaggccgcaaggcattgaggagaagctcatggccggcgcaaaagagatacgtagtaagatcgcaagcgtccagaacacgcaaaagatcactaaagcgatggagatggtcgccgcttccaaaatgcgtaaatcgcaggatcgcatggcggccagccgtccttatgcagaaaccatgcgcaaagtgattggtcaccttgcacacggtaatctggaatataagcacccttacctggaagaccgcgacgttaaacgcgtgggctacctggtggtgtcgaccgaccgtggtttgtgcggtggtttgaacattaacctgttcaaaaaactgctggcggaaatgaagacctggaccgacaaaggcgttcaatgcgacctcgcaatgatcggctcgaaaggcgtgtcgttcttcaactccgtgggcggcaatgttgttgcccaggtcaccggcatgggggataacccttccctgtccgaactgatcggtccggtaaaagtgatgttgcaggcctacgacgaaggccgtctggacaagctttacattgtcagcaacaaatttattaacaccatgtctcaggttccgaccatcagccagctgctgccgttaccggcatcagatgatgatgatctgaaacataaatcctgggattacctgtacgaacccgatccgaaggcgttgctggataccctgctgcgtcgttatgtcgaatctcaggtttatcagggcgtggttgaaaacctggccagcgagcaggccgcccgtatggtggcgatgaaagccgcgaccgacaatggcggcagcctgattaaagagctgcagttggtatacaacaaagctcgtcaggccagcattactcaggaactcaccgagatcgtctcgggggccgccgcggtttaaacaggttatttcgtagaggatttaagatggctactggaaagattgtccaggtaatcggcgccgtagttgacgtcgaattccctcaggatgccgtaccgcgcgtgtacgatgctcttgaggtgcaaaatggtaatgagcgtctggtgctggaagttcagcagcagctcggcggcggtatcgtacgtaccatcgcaatgggttcctccgacggtctgcgtcgcggtctggatgtaaaagacctcgaacacccgattgaagtcccggtaggtaaagcgactctgggccgtatcatgaacgtactgggtgaaccggtcgacatgaaaggcgagatcggtgaagaagagcgttgggcgattcaccgcgcagcaccttcctacgaagagctgtcaaactctcaggaactgctggaaaccggtatcaaagttatcgacctgatgtgtccgttcgctaagggcggtaaagttggtctgttcggtggtgcgggtgtaggtaaaaccgtaaacatgatggagctcattcgtaacatcgcgatcgagcactccggttactctgtgtttgcgggcgtaggtgaacgtactcgtgagggtaacgacttctaccacgaaatgaccgactccaacgttatcgacaaagtatccctggtgtatggccagatgaacgagccgccgggaaaccgtctgcgcgttgctctgaccggtctgaccatggctgagaaattccgtgacgaaggtcgtgacgttctgctgttcgttgacaacatctatcgttacaccctggccggtacggaagtatccgcactgctgggccgtatgccttcagcggtaggttatcagccgaccctggcggaagagatgggcgttctgcaggaacgtatcacctccaccaaaactggttctatcacctccgtacaggcagtatacgtacctgcggatgacttgactgacccgtctccggcaaccacctttgcgcaccttgacgcaaccgtggtactgagccgtcagatcgcgtctctgggtatctacccggccgttgacccgctggactccaccagccgtcagctggacccgctggtggttggtcaggaacactacgacaccgcgcgtggcgttcagtccatcctgcaacgttatcaggaactgaaagacatcatcgccatcctgggtatggatgaactgtctgaagaagacaaactggtggtagcgcgtgctcgtaagatccagcgcttcctgtcccagccgttcttcgtggcagaagtattcaccggttctccgggtaaatacgtctccctgaaagacaccatccgtggctttaaaggcatcatggaaggcgaatacgatcacctgccggagcaggcgttctacatggtcggttccatcgaagaagctgtggaaaaagccaaaaaactttaacgccttaatcggagggtgatatggcaatgacttaccacctggacgtcgtcagcgcagagcaacaaatgttctctggtctggtcgagaaaatccaggtaacgggtagcgaaggtgaactggggatctaccctggccacgcaccgctgctcaccgccattaagcctggtatgattcgcatcgtgaaacagcacggtcacgaagagtttatctatctgtctggcggcattcttgaagtgcagcctggcaacgtgaccgttctggccgacaccgcaattcgcggccaggatctcgacgaagcgcgagccatggaagcgaaacgtaaggctgaagagcacattagcagctctcacggcgacgtagattacgctcaggcgtctgcggaactggccaaagcgatcgcgcagctgcgcgttatcgagttgaccaaaaaagcgatgtaacaccggcttgaaaagcacaaaagccagtctggaaacaggctggcttttttttgcgcgtgtgacccgtcctgaatagcgttcacatagatcctgctgatataaaacccccctgttttcctgtttattcattgatcgaaataagagcaaaaacatccacctgacgcttaaattaaggtactgccttaattttctgcagacaaaaggcgtgacgatggtcgaaaatggcgctttcgtcagcggggataatccgttattgaacaatttatcctctgtccatttcacgatgaaaaaaatgtagttttttcaaggtgaagcggtttaaattcgttctcaaattacagtcaggacgcgtatgttgaataatgctatgagcgtagtgatccttgccgcaggcaaaggcacgcgcatgtattccgatcttccgaaagtgctgcatacccttgccgggaaagcgatggttcagcatgtcattgatgctgcgaatgaattaggcgcagcgcacgttcacctggtgtacggtcacggcggcgatctgctaaaacaggcgctgaaagacgacaaccttaactgggtgcttcaggcagagcagctgggtacgggtcatgcaatgcagcaggccgcacctttctttgccgatgatgaagacattttaatgctctacggcgacgtgccgctgatctctgtcgaaacactccagcgtctgcgtgatgctaaaccgcagggtggcattggtctgctgacggtgaaactggatgatccgaccggttatggacgtatcacccgtgaaaacggcaaagttaccggcattgttgagcacaaagatgccaccgacgagcagcgtcagattcaggagatcaacaccggcattctgattgccaacggcgcagatatgaaacgctggctggcgaagctgaccaacaataatgctcagggcgaatactacatcaccgacattattgcgctggcgtatcaggaagggcgtgaaatcgtcgccgttcatccgcaacgtttaagcgaagtagaaggcgtgaataaccgcctgcaactctcccgtctggagcgtgtttatcagtccgaacaggctgaaaaactgctgttagcaggcgttatgctgcgcgatccagcgcgttttgatctgcgtggtacgctaactcacgggcgcgatgttgaaattgatactaacgttatcatcgagggcaacgtgactctcggtcatcgcgtgaaaattggcaccggttgcgtgattaaaaacagcgtgattggcgatgattgcgaaatcagtccgtataccgttgtggaagatgcgaatctggcagcggcctgtaccattggcccgtttgcccgtttgcgtcctggtgctgagttgctggaaggtgctcacgtcggtaacttcgttgagatgaaaaaagcgcgtctgggtaaaggctcgaaagctggtcatctgacttacctgggcgatgcggaaattggcgataacgttaacatcggcgcgggaaccattacctgcaactacgatggtgcgaataaatttaagaccattatcggcgacgatgtgtttgttggttccgacactcagctggtggccccggtaacagtaggcaaaggcgcgaccattgctgcgggtacaactgtgacgcgtaatgtcggcgaaaatgcattagctatcagccgtgtgccgcagactcagaaagaaggctggcgtcgtccggtaaagaaaaagtgattctggccggctaacccggtcacatgggatgaggagataacataatctccctcccacaagcagtaactataaaaataaccccactctctacaaggctcggggcgcccgaaaaaacgggcatacaggttgaccgacaacgatataaatcggaatcaaaaactatgtgtggaattgttggcgcgatcgcgcaacgtgatgtagcagaaatccttcttgaaggtttacgtcgtctggaataccgcggatatgactctgccggtctggccgttgttgatgcagaaggtcatatgacccgcctgcgtcgcctcggtaaagtccagatgctggcacaggcagcggaagaacatcctctgcatggcggcactggtattgctcacactcgctgggcgacccacggtgaaccttcagaagtgaatgcgcatccgcatgtttctgaacacattgtggtggtgcataacggcatcatcgaaaaccatgaaccgctgcgtgaagagctaaaagcgcgtggctataccttcgtttctgaaaccgacaccgaagtgattgcccatctggtgaactgggagctgaaacaaggcgggactctgcgtgaggccgttctgcgtgctatcccgcagctgcgtggtgcgtacggtacagtgatcatggactcccgtcacccggataccctgctggcggcacgttctggtagtccgctggtgattggcctggggatgggcgaaaactttatcgcttctgaccagctggcgctgttgccggtgacccgtcgctttatcttccttgaagagggcgatattgcggaaatcactcgccgttcggtaaacatcttcgataaaactggcgcggaagtaaaacgtcaggatatcgaatccaatctgcaatatgacgcgggcgataaaggcatttaccgtcactacatgcagaaagagatctacgaacagccgaacgcgatcaaaaacacccttaccggacgcatcagccacggtcaggttgatttaagcgagctgggaccgaacgccgacgaactgctgtcgaaggttgagcatattcagatcctcgcctgtggtacttcttataactccggtatggtttcccgctactggtttgaatcgctagcaggtattccgtgcgacgtcgaaatcgcctctgaattccgctatcgcaaatctgccgtgcgtcgtaacagcctgatgatcaccttgtcacagtctggcgaaaccgcggataccctggctggcctgcgtctgtcgaaagagctgggttaccttggttcactggcaatctgtaacgttccgggttcttctctggtgcgcgaatccgatctggcgctaatgaccaacgcgggtacagaaatcggcgtggcatccactaaagcattcaccactcagttaactgtgctgttgatgctggtggcgaagctgtctcgcctgaaaggtctggatgcctccattgaacatgacatcgtgcatggtctgcaggcgctgccgagccgtattgagcagatgctgtctcaggacaaacgcattgaagcgctggcagaagatttctctgacaaacatcacgcgctgttcctgggccgtggcgatcagtacccaatcgcgctggaaggcgcattgaagttgaaagagatctcttacattcacgctgaagcctacgctgctggcgaactgaaacacggtccgctggcgctaattgatgccgatatgccggttattgttgttgcaccgaacaacgaattgctggaaaaactgaaatccaacattgaagaagttcgcgcgcgtggcggtcagttgtatgtcttcgccgatcaggatgcgggttttgtaagtagcgataacatgcacatcatcgagatgccgcatgtggaagaggtgattgcaccgatcttctacaccgttccgctgcagctgctggcttaccatgtcgcgctgatcaaaggcaccgacgttgaccagccgcgtaacctggcaaaatcggttacggttgagtaataaatggatgccctgcgtaagcggggcatttttcttcctgttatgtttttaatcaaacatcctgccaactccatgtgacaaaccgtcatcttcggctactttttctctgtcacagaatgaaaatttttctgtcatctcttcgttattaatgtttgtaattgactgaatatcaacgcttatttaaatcagactgaagactttatctctctgtcataaaactgtcatattccttacatataactgtcacctgtttgtcctattttgcttctcgtagccaacaaacaatgctttatgaatcctcccaggagacattatgaaagttatgcgtaccaccgtcgcaactgttgtcgccgcgaccttatcgatgagtgctttctctgtgtttgcagaagcaagcctgacaggtgcaggtgcaaccttccctgcgccggtgtatgccaaatgggctgacacttaccagaaagaaaccggtaataaagttaactaccagggtatcggttcttccggtggcgtaaaacagattatcgctaataccgttgattttggtgcctctgacgcgccgctgtctgacgaaaaactggctcaggaaggtctgttccagttcccgaccgtgattggcggcgtggtgctggcggttaacattccagggctgaagtctggcgaactggtgctggatggtaaaaccctcggcgacatctacctgggcaaaatcaagaagtgggatgatgaagccatcgccaaactgaatccgggtctgaaactgccttcacaaaacattgctgtagtacgccgcgcagatggctccgggacttccttcgtcttcaccagctacctggcgaaagtgaacgaagagtggaaaaacaacgttggtactggctctaccgtaaaatggccgatcggtctgggcggtaaaggtaacgacggtatcgccgcgttcgttcagcgtctgccgggtgcaattggttatgttgaatatgcttacgcgaagcagaacaacctggcgtacaccaaactgatctccgctgatggtaaaccggttagtccgaccgaagaaaacttcgctaatgcagcaaaaggtgcagactggagcaaaaccttcgctcaggatctgaccaaccagaaaggcgaagatgcatggcctattacctctaccacgttcattctgatccacaaagatcagaagaaaccagaacaaggcacagaagtgctgaaattcttcgactgggcgtacaaaaccggggctaaacaggcgaacgacctggattacgccagcctgccggatagtgtagttgaacaggttcgcgctgcgtggaagaccaatattaaagacagtagcggtaagccgctgtactaataaaactccaggccgggtacggtgttttacgccgcatccggcattacaaaatgactttgtaaacgcgtttaactgaagagtaacttatggctgcaaccaagcctgcttttaacccaccgggtaaaaagggcgacataattttcagcgtgctggtaaaactggcggcgctgattgtgctattgatgttgggtggcattattgtctctctgatcatctcctcctggccgagcattcagaaatttggtctggctttcctatggaccaaagagtgggatgcaccgaacgatatctacggggcgctggtgccgatctacggtacgttggtgacttcgtttatcgcgctgctgatcgccgtcccggtgagtttcggtatcgccctgttcctgactgagcttgcgcctggctggctgaaacgcccgctgggtatcgccattgagctgctggcagccattccaagtatcgtttacggcatgtggggcctgtttatctttgcgccgctgttcgccgtttactttcaggagccggtcggcaatatcatgtcgaatatcccgattgttggcgcgctgttctctggccccgcatttggtatcggtatcctcgcggcaggcgtgatcctcgccatcatgattattccgtacattgcggcggtaatgcgtgatgtgttcgaacaaaccccggtgatgatgaaagagtcggcctacggtattggctgcaccacctgggaagttatctggcgtatcgttcttccgttcaccaaaaatggtgttatcggcggcatcatgctggggctgggccgcgcgctcggtgaaaccatggcggtgacctttatcatcggtaacacctaccagctcgacagcgcctcgctgtatatgccgggcaacagtatcacctctgcgctggcgaacgaatttgcggaagcggaatccggtctgcacgttgccgcactgatggaactgggcctgatcctgtttgtgattaccttcatcgtcctcgccgcatcgaagtttatgattatgcgcctggctaagaatgagggggcacgctaatggctatggttgaaatgcaaaccactgcggcgctggctgaatctcgccgcaaaatgcaggcgcgtcgccgcctcaaaaaccgtattgcgctgacgctctcgatggcgacgatggccttcggcctgttctggctgatctggattttaatgtccaccatcactcgcggtatcgacggtatgtcgctggcgctgttcactgaaatgacgccgccgcccaatacggaaggtggtggtctggcgaacgctctggcgggtagcgggctgttaattttgtgggccacggtattcggtacgccgctgggcattatggcggggatttatctggcggaatatggtcgtaaatcctggctggcagaagtgattcgcttcattaacgacattctgctctctgcgccgtcgattgtggttggtctgtttgtttacaccattgtggtggcgcagatggagcacttctccggctgggcgggcgtgattgccctggcgttgttgcaggtgccgattgttatccgcaccaccgagaacatgctgaaactggtgccgtacagcctgcgtgaagcggcttatgcgctgggtacaccgaagtggaagatgatctctgcgattacgctgaaagcgtcggtgtccgggattatgaccggtatcctgctggcgattgcccgtattgctggtgaaaccgcgccgctgctgtttaccgcgctctccaaccagttctggagcacggacatgatgcagccgatcgccaacctgccggtgacgatctttaagtttgcgatgagcccgtttgcggaatggcagcaattggcctgggccggggtattgatcattaccctgtgcgtactgctgctgaacattctggcgcgcgttgtttttgcgaagaataaacacggttgatattgctgacacggttttcccctcaccctaaccctctccccagaggggcgaggggaccgaccgagcgcctttttgactctgtacacggttaacactttgccggatgcggcgtgaacgcctgatccggcctacggtaagcctgattagcgaagtgcatcaggcacgatgaggaaaagattgcaatgagtatggttgaaactgccccgagtaaaattcaggttcgtaatttgaacttctactacggcaaattccatgccctgaaaaacatcaacctggatatcgctaaaaaccaggtaacggcgtttatcgggccgtccggctgcggtaaatcgacgctgctgcgtaccttcaacaaaatgtttgaactgtacccggagcagcgtgcggaaggtgaaattctgcttgatggcgacaacatcctgaccaactctcaggatatcgcactgctgcgtgcgaaagtgggcatggtgttccagaaaccgacgccgtttccgatgtccatctacgacaacatcgcttttggcgttcgtctgtttgagaagctctcccgtgccgacatggacgagcgcgtgcagtgggcattgaccaaagccgcattgtggaacgaaaccaaagataaattgcaccagagcggttactctctctctggtggtcagcaacagcgtctgtgtattgcgcgtggtatcgccattcgcccggaagtgctgctgctcgacgaaccgtgttcggcgctcgaccctatctctaccgggcgtattgaagagctgatcaccgaactgaagcaggattacaccgtggtgatcgtcacccacaacatgcagcaggctgcgcgttgttccgaccacacggcgtttatgtacctgggcgaattgattgagttcagcaacacggacgatctgttcaccaagccagcgaagaaacaaacagaagactacatcaccggtcgttacggttgattcaggagtgcgttatggacagtctcaatcttaataaacatatttccggccagttcaacgccgaactggaaagtatccgcacgcaggtgatgaccatgggcggcatggtggagcagcagctttctgatgcaatcaccgcgatgcataaccaggacagcgatctggcgaagcgcgtcatcgaaggcgacaagaacgtcaacatgatggaagtggcgatcgatgaagcctgcgtgcgcattatcgccaaacgtcagccgacggcgagcgacctgcgactggttatggtgatcagtaaaaccattgccgagctggagcgtattggcgacgtggcggacaaaatctgccgtactgcgctggagaaattctcccagcagcatcagccgttgctggtaagtctggagtcgctgggccgtcataccatccagatgctgcacgacgtgctggacgcgttcgcgcggatggacattgacgaagcggtacgtatttatcgtgaagataaaaaagtcgatcaggaatacgaaggtattgttcgtcaactgatgacctacatgatggaagattcgcgtaccattccgagcgtacttactgcgctgttctgcgcgcgttctatcgaacgtattggcgaccgctgccagaatatttgtgagtttatcttctactacgtgaaggggcaggatttccgtcacgtcggtggcgatgagctggataaactgctggcggggaaagatagcgacaaataattcaccagacaaatcccaataacttaattattgggatttgttatatataactttataaattcctaaaattacacaaagttaataactgcgagcatggtcatatttttatcaatagcgcattgctattttctctgcacgcaattaaattaatttccgaacctggatgttcgttataaaaaccattaataaatgactggattgttactgcattcgcaggcaaaacctgacataaccagagaatactggtgaagtcgggtttttttgtttataaaaaaggtccttgctatgaacatgcaaatcaccaaaattctcaacaataatgttgtggtggttattgatgatcaacagcgggaaaaagtcgtcatggggcgcggaattggctttcaaaaacgcgctggcgaaagaattaactcaagtggaatagaaaaagagtatgccttgagcagtcatgaactgaacgggcgattaagcgaactcttaagtcatattcctcttgaggtgatggcaacctgtgatcgtattatctctttagcgcaggagcgcttgggaaaattacaggacagtatttatatctcgctaactgaccattgccagtttgcgattaaacgctttcagcaaaacgtgttgctgcccaacccgttgctgtgggatatccagcggctttacccgaaagagttccagctaggggaagaagcgttaaccattattgataaacggttgggcgtgcagttaccgaaagatgaagtgggctttattgccatgcatctggtcagtgcccaaatgagcggaaatatggaggatgttgcaggtgtcacgcagttaatgcgcgaaatgctgcaattaataaaatttcagttcagccttaattaccaggaagaaagcttgagttatcagcgactggttacacatctgaagtttttatcctggcgtattcttgaacatgcttcaattaacgatagtgatgaatcattacaacaagcagtaaaacaaaattacccgcaagcatggcaatgtgcggaacggatcgccatttttattggtttgcagtatcaacgtaaaatttcacccgcagagattatgtttttagccataaatatagagcgcgtgcgcaaagaacactgaaatattattactgagtaaaggattgttaccgcactaagcgggcaaaacctgaaaaaaattgcttgattcacgtcaggccgtttttttcaggtttttttttggagttttgccgcaaagcggtagagggcaagttatgacggagttagccagaaaaatagtcgcaggagtcgggggcgcagataacattgtgagtctgatgcattgcgcaacgcgattacgttttaaattaaaggatgaaagcaaagcgcaagcagaggtactgaaaaagacccccggtattattatggtggtggaaagcggtggccagtttcaggtggtcataggtaaccatgtggccgatgtcttcctggcggttaacagtgtggcaggccttgacgaaaaagcgcaacaggcaccggaaaatgatgataaaggtaatctgctaaaccgctttgtttatgttatttcaggtatttttacgcctctgatcggtttgatggcggcaaccgggatcttgaaaggtatgctggctctggcgctcacttttcagtggacgaccgaacaaagtggtacttatttaattttattcagcgccagtgatgccttgttttggttcttcccgataatcctgggatacaccgcggggaaacgcttcggcggtaatccatttactgccatggtgattggtggagcgttagtgcatccattaattctgactgctttcgagaacgggcaaaaagcggatgcgctggggctggatttcctgggtattccggtcacattgttgaattactcgtcatcggttattcccattattttttctgcctggttgtgcagcattctggaacgccgacttaatgcgtggttaccgtcggcaatcaaaaatttcttcacaccattgctatgtctgatggttatcacacccgtcacctttctgctggtggggccgctatcaacctggataagcgaactgattgccgccggttatctctggctttatcaggcggttcctgcatttgcgggcgcggtaatgggcggcttctggcaaatcttcgtcatgttcggactgcactggggcctggtgccgctgtgtatcaataacttcaccgtgctgggctacgacaccatgatcccgctgttaatgcccgccattatggcgcaggtcggggcggcgctcggcgtcttcctctgcgaacgcgatgcgcagaaaaaagtggtggcgggatcagcggcgttgacgagtctgtttggtatcaccgaaccagcggtatatggcgtcaacctgccgcgtaagtacccctttgttatcgcctgtatcagtggggctttgggggccaccattattggctacgcgcaaacgaaagtctactcctttggtttgccaagtattttcaccttcatgcaaaccatcccgtcaacgggaattgatttcaccgtctgggccagcgttattggcggtgtcattgccatcggttgcgcatttgtcggtacggtgatgcttcatttcatcaccgctaaacgtcagccagcgcagggtgccccgcaagagaaaacaccagaggttattacaccacctgagcagggcggtatctgttcaccgatgacgggagagattgtgccgctcattcacgtcgctgataccacgtttgccagtggcctgttgggtaaaggtattgccattctgccctcggttggtgaagtgcgttctccggttgcgggtcgaattgcttcgttgttcgccacattacacgccattggcattgagtcagatgatggtgtggagatcctgattcatgtcggtatcgacaccgtaaaactggacggcaaattcttttccgctcacgtcaacgtgggtgacaaggtcaatacaggcgatcggctgatttcttttgatatccctgctattcgcgaggccggatttgatctgacgacgccggtattaatcagtaatagcgatgattttacggacgtattaccccacggcacggcgcagataagcgcaggtgaaccgctgttatccatcattcgctaacgataaaaggagttaattatgaaagcatttccagaaacatttctttggggtggcgcaacagctgccaatcaggtggaaggtgcctggcaggaagatggcaaagggatctcgacctcagatttacagcctcatggcgtaatgggaaaaatggaaccgcgcatcctggggaaagagaatatcaaagatgtcgccatcgatttttatcaccgttacccggaagatatcgcgttatttgccgagatgggcttcacctgtctgcgtatttccattgcctgggcgcgaattttccctcagggcgacgaagtcgaaccgaatgaagcggggttagcgttttacgatcggctgtttgatgaaatggcgcaggcggggatcaagccgctggtaacgttatcccattacgaaatgccatatgggctggtgaaaaactacggcggttgggctaatcgagcggtcatcgatcacttcgagcattacgcccgcacggtctttactcgctaccaacataaagtggcgttatggctgacgtttaatgaaatcaacatgtcgttacacgcgccattcacgggcgtggggctggcagaagagagtggcgaggcggaagtttatcaggctatccaccatcaactggttgccagtgcgcgggcagttaaagcctgtcatagcctgctccccgaagcgaaaatcggcaatatgcttctcggtgggctggtttaccccctcacctgccagccacaggatatgttgcaggccatggaagagaaccggcgctggatgttctttggtgatgttcaggcgcgtggccagtatcccggctatatgcagcgtttcttccgcgaccacaatatcaccattgagatgactgaaagtgacgcagaagatttaaaacataccgtcgatttcatctcttttagttattacatgactggttgtgtttcccacgacgaaagcattaataaaaatgcgcagggcaacatactgaatatgatccccaatccgcatctgaaaagttcagagtgggggtggcaaattgatccggttggattacgggttctgttaaatacgctttgggatcgttatcaaaaaccgttatttattgtcgagaacggattaggcgcaaaagacagcgttgaagcggatggttcgatacaggacgattatcgaattgcctatttaaacgatcacctggtacaggtaaatgaagcgattgccgatggtgtggatattatggggtacaccagttgggggccaattgatttagtcagtgcatctcattcacaaatgtctaagcgctacggctttatttatgtggatcgtgatgataatggcgaaggaagcctcacaagaacacgcaagaaaagcttcggatggtatgcagaggtgatcaagacgcgggggctgtcattaaaaaaaataaccattaaagcaccttaattatcgtcgcattcagaacagtctggatgcgatgcgttaattctttctttgcaccataaagggatattatgtttagacgaaatcttattacctctgccatcttattaatggcaccgttagccttttctgcacaatcattggctgaatcattaacggtggaacaacgccttgagttattagaaaaggcgttaagagaaacgcaaagcgaactcaaaaagtataaagatgaagagaagaaaaagtatacgccagcgacggtgaatcgtagcgtaagtacgaatgatcaagggtatgccgccaatccgttcccgaccagtagtgccgcaaaacctgatgctgtactggtcaaaaatgaagagaaaaatgccagtgagacaggctcgatttattcttccatgactctgaaagatttcagtaaatttgtgaaagatgaaattggctttagttacaacggctattaccgttctggttgggggaccgcctctcatggttcacctaaatcatgggcgattggttctctgggccgctttggtaacgaatactccggctggtttgatttgcagttaaaacaacgtgtctacaacgaaaacggcaaacgggttgatgccgttgtgatgatggatggtaacgttggtcagcagtactctaccggctggtttggcgataacgccggtggcgagaactatatgcagttctccgatatgtacgttaccaccaaaggtttcctgccctttgcgccagaggctgatttctgggtgggtaaacacggtgcgccgaaaattgaaatccagatgcttgactggaaaacgcagcgtactgatgccgcagcgggtgtaggtctggaaaactggaaagtcggtccgggtaaaattgatatcgcgctggttcgcgaagatgtcgatgattacgatcgcagcctgcaaaacaaacagcagattaataccaataccattgatttacgctataaagatatcccgttatgggataaagccaccttaatggtaagtggtcgttatgtcacggcaaacgaaagcgcatcggaaaaagataatcaggataataacgggtattatgactggaaagatacctggatgtttggcacatctttaacgcagaaatttgataaaggtggcttcaacgaattctccttcctggtcgcgaataactctatcgccagtaactttggccgttatgctggcgcaagtccatttaccacctttaatggtcgttattatggtgatcacaccggcggaacagcggtacgtctgacttcgcagggcgaagcctatattggcgatcatttcattgtagctaacgcgattgtttactccttcggtaacgatatatatagctacgaaacaggcgcccactctgatttcgaatctattcgtgcggttgttcgcccggcctatatttgggaccaatataaccagacaggtgttgaactgggctatttcacccagcaaaacaaagatgcgaatagtaataaatttaatgagtctggttataaaaccacgctcttccatacctttaaagtcaataccagtatgttgacctcgcgtccggaaattcgtttctacgccacgtatatcaaagccctggaaaacgaactggatggcttcacctttgaagacaataaagacgaccagtttgctgtcggtgcccaggctgaaatctggtggtaatggaacttaatgaaaggaatattacgatgaatataaaaattgctgctttaacgctggctattgccagcggtatttctgctcagtgggccatagcagcggatatgccagccagcccggcacccactatcccggtgaaacagtatgtgactcaggtcaatgccgataacagcgtgacctttcgctactttgcccctggggcaaaaaatgtctctgtagtggtgggtgttccggttccggacaatattcacccgatgaccaaagacgaagcaggagtctggtcgtggcgcacacctatcctgaaaggcaacctgtacgagtattttttcaatgttgatggtgtacgcagcattgatacaggcaccgcaatgactaatcctcagcgccaggttaactccagtatgattctggtgccaggcagttatctggatacgcgttctgttgcgcatggtgatttgatcgccataacttaccactccaacgcattgcaatctgaacgtcagatgtatgtctggaccccgccaggatacaccggcatgggcgagcctttgccagtgctctatttctatcacggctttggtgataccggacgttccgctatcgatcaggggcgtatcccgcaaatcatggataacctgcttgctgaagggaaaattaaaccgatgctggtggtgatcccggatacagaaaccgatgcgaagggcattattcccgaagatttcgtgcctcaggaaagacgtaaagtcttttatccgctgaatgctaaagcggcagatcgcgaactgatgaacgatattatcccgctgattagcaagcgttttaatgtccgtaaagatgccgatggccgcgcgctggcagggctttcacaaggcgggtaccaggcgctggtttccggaatgaatcatctggaaagctttggctggctggccacattcagtggtgttaccacgacaaccgtaccggatgaaggtgtcgcggcccgactgaacgatccggcagctatcaaccagcaactacgtaattttactgtggttgtgggggataaagatgtcgtaaccggcaaggatatcgccgggctgaaaactgagcttgagcagaaaaaaattaactttgattaccaggaatatccgggtctgaaccatgaaatggatgtctggcgaccagcctatgcagcctttgtacagaaattatttaaataaaataaggcattaagatgaaattaatcattaccgaagattaccaggaaatgagccgtgtcgcggcacaccatctgcttggttatatgtcgaagacgcgtcgtgttaacctggcaattaccgccggtagcacgcccaaaggcatgtatgaatacctcaccaccctggttaaaggtaagccctggtacgataactgctatttctataattttgatgaaattccatttcgcggcaaagagggagaaggcgtaacgattaccaatctgcgtaatctgtttttcacccctgcggggatcaaagaagagaatatccagaagctcactattgataactaccgcgagcatgatcagaaactggcgcgtgaaggcggactggatttggtggtgctgggattaggtgcagatggtcatttttgtggcaatttgccgaatacgacccatttccatgagcaaaccgtggagttcccgatccagggagagatggttgatattgtggcgcatggcgagttgggcggcgacttttcgttagtgcctgacagctacgtgacgatggggccgaaaagcatcatggcggcgaaaaacttgctgataattgtcagcggcgcgggtaaagcgcaggcactgaaaaatgttctgcaaggtccggttaccgaagatgttccagcttccgtgttgcagctgcatccttcgctgatggtaatcgctgataaagccgctgccgcagaattagcactcggttaagcttaagaaataaggccggatgtgtgaattacgctccggcctgttctcattatttaaataactacgaaaaatcaccccacagtctcagcttgccgcagtggagacagcggaagagataaccctgacaatgaccacccttttgcaggcatttagctagatcagaatttctaataccgaaattctcacaatcttcttcaaggttggcaaattcatcgaggcgatcttttatatcattccagcccacatagccgataaaaacacagaaatcgccacaatgcgcgagccagaattcctgctgccatccatgataacctggcgtgcgttcaaccaactctttcagcatttcatcaggatatgtgttcttaataccggcaaattcgtcctcttcatcatactcaaattcaacaccttctatgctggcatcatcctgaaaactacctgcaaacttttcagcagcagaaccgtccgcaatacaccacggacagagatgttcaacttcatcaacgcaataaaagggacccgagtaataaactgacgtctgttgttcacagcaatcgcactctacggttttatcctgttcaaatgcgcctgtttccagtggcttgggatgatatttgaattggggtaacggcctgatattttgagtcatagaaacatcctgtctgcttttgagtagcccaaagataaagtatcccgcttaacttaaagagtctgtttcaggacatgaaatatccaatccgggtagacgggtaatgattctgctcatcaccacacctgccagcaatgcaggaatgatgcggacaacgagactgtcaccagaaagaatgttttcaaacaactccgaggaagccatgcccttaatatgtacaataactgcacaatagatctcggtgataacgacgccacctatgccaccagccagacaacgataacgtttctgtgacccgatcttttccggcagacaggcaaccattacaccggttaacaacgcaggaatagctcccgtagttatcgacaataagagaaaaattggatgtattatcacccaaagaaccagcggttcttttgcgaagaatatgtagaggacaagaaacagaacaccaattaacggtcctaaaactgcaaaataaagtccgtgatgtattacccgacgtgaaacagacatatcaaactccctttacttacctttgagcgccaatttaagcggggtaagtgaagggagtgtgaagaactatgccgtaatatcccaaccacgcgctttccacagttcaggtaactgcgaaagatgggtaaaggtggtgactttcgggtgaacgatcggcttattgtgcgggtcggcgcagaagtagaacacttccatacctgcgtcgataccagattgtgcaccggcaactgagtcatcaaccagaatgcagttttctacatttacattcatcgcttttgccgcatggaacattaacgccgggtctggcttccagcgctgaatatcgtagccgctgaacagtttatccgggaagtagtgcaacatattcagcttgcccatagaatgctgcattttgttatttgggccgttagataccacacacattggcgcagtgatcgctgacaggagcgctccagccccttcgatggcttccagttctgaatcgaacagccgagcgacttctgcacggtaaacgtgttcagcttctgttttcgctaacgtaacaccatgttcaagggaaacaatatcgataatttcgtacagttttacacctttgaaacgtttgaatacctcttcaggatcgagcgtaataccaaattcctgaaacatcgttacatatgcgcgagagcaaatgacttcactgtcgaccagcgtaccgtcgcagtcgaaaaataccgcttctatccgggacatgcctttcctttttaatcagtttaacgttttcgtagagccgatttgcgcaacgcaatcgttgccgtataagtaaatccaataaaaaagtctctcacaaacgcgcctattgtcgcattttggtatacgatagcgacggattttccctccttgttcggaaatagataatgagtcatcaacataccacccagacttctggtcaggggatgctggaacgcgtgtttaaactgcgcgaacatggcacgacggcacggaccgaagtgatcgccggttttaccaccttcctgacgatggtttacatcgtttttgttaacccgcaaattcttggcgttgctggcatggataccagcgccgtcttcgtcactacctgtctgatcgctgcattcggcagtattatgatgggactgtttgctaacctgccagttgcactggcacccgctatgggcctgaatgcgttcttcgcttttgtcgttgtacaggcgatgggcttgccgtggcaggtcgggatgggcgcaatcttctggggcgcgataggtctgctgttactgacgattttccgcgttcgctactggatgatagccaacattccggtgagtctgcgtgtgggtattaccagcggtatcggtctgttcattggcatgatggggctgaaaaacgcaggtgtgattgtcgctaacccggaaacgctggtgagcatcggtaatctgacttctcacagcgtacttctgggtatcctcggcttcttcatcattgctattctggcctcgcgcaacattcacgcagcggtgctggtttctatcgtggtgacgacgctgctgggctggatgctgggtgatgtgcactacaatggcatcgtttctgcgccgccgagcgtaatgacagttgtgggtcatgtagatttagccgggtcgtttaacctcgggctggcaggggtgattttctctttcatgttggtcaacttgtttgactcctccggtacgctgattggcgtgaccgataaagcaggtctggcggatgagaaggggaaattcccgcgcatgaagcaggcgctgtatgtcgacagtatctcttccgtgaccggttcgtttatcggtacttcttccgttacggcttatattgagtcctcttccggcgtatcggttggcggtcgtaccggtctgacggcagtggttgttggtctgctgttcctgctggttatctttctgtcgccgctggcggggatggtgccaggctacgctgcagctggtgcgctgatttacgttggcgtgctgatgacttccagtctggcacgcgtgaactggcaggatcttactgaatctgttccggcgtttattaccgccgtgatgatgccgttcagcttctcgattaccgaaggtatcgcgctgggctttatctcctactgcgtgatgaaaatcggtaccggacgtctgcgtgatctaagcccgtgcgtaatcatcgttgcgctgctgtttatcctgaagattgtctttatcgacgctcactaaaatcgatagcgcgttaaaaacccgccatgcatgattgctggcgggttttttatttagatcttaactcgctgaataaactcaccaaatgcggtcaattgcccggtcaggtggtccagcgtaccctgatcaatcacttctccggtttgcggatcaactttgttctgaatcacgccgcccataaattccggcttgttcatcaccattgcatcgaggaaaaccagaatctggcgcaggtgatactgacagcgcgcgccgccaatcacgcccattgagctggtctgaatcaataccggtttaccggccagcggttgatccggcaggcgggaaagccagtcgatggcatttttcagcccacccggtaccgagtagttatattccggcgtgacgatcaccacaccgtcagcctgacggatctgttccgccagagcttcaaccgttgctggaaaaccttcttcctgctgtacgtcagcgtcatacaagggaatgtcggcaatggatggtaacgcattgacttccatgctcgccggagcaattttcggcagggtacgtgcaaccatgccattaaatgagcctttgcgcaggctccccagtaacgtaaccacctgcaatttttcagacatgatgactcctgtggttgtctatcaatttggcgaaaaagccttcacggtagagagttgggcaaaacgcatcatccggctggtaggattgttggcgcggctgtgaatatccggcaggcttttccagccgtgtttgccatctaactcccagacactgagcttttcaatcgtgggcgtgaccgccacggaccacaccagcacgtcttccgcgtcgcataacgcttctacatgatttacatgagcacatttcaggcgtccggcaatgggcagcagctgcagatcgcgcggatcgtcattcaaaacatcaccggttagttttagcacgcttcggcgcagcgtgatgagctgcgcccgcgcttcgttaggatcgttttgtttactgatccatagcgattcattgctggaaaaggtgtggttatcgggcgcgtgtgggctatgaaacccgcgcgtcgcacgctgtagttccatatcgaggccacattcaccttcggttgttaacgccacgccaaccatattcccggcataggaaatggaaaacgaaggcaaatttttatcactgaaaaccggtttacctttcggcagggtgacgatttccggcaattcgccaatgccatacagcatgaacatcagttctgcgagtaaacctctggacgccagaaaacggctttgacgatgagggggaatgtttcgggcttcttgatgacactgggaggggagacgaacagaaatcagatgtccttccgttaaaatccctcgggcaaagtgagtcgccatttttcgctccatgcttaatggtccattatgaatacaagagtaatcatttactggaatgatggacagactaaagcggctaaaagttcgattcagacaagcttattacaacttttttacattttattgtgaaattggatttgcccctatatttccagacatctgttatcacttaacccattacaagcccgctgccgcagatattcccgtggcgagcgataacccagcgcactatgcggatgccattcgttataatgctcgaacgcctctgcaaggttctttgctgccgttaacccgtctggtttgggcatgatactgatgtagtcacgctttatcgttttcacgaagctctctgctattccgttactctccggactccgcaccgccgtgttcttcggttcaagtcccaacatccgggcgaactggcgtgtttcattagcccggtagcatgaaccattatccgtcagccactccactggagacgacggaagatcgttgccgaagcggcgttccaccgctcccagcatgacgtcctgtactgtttcactgttgaagccgccggtagtgaccgcccagtgcagtgcctcacgatcacagcagtccagcgcgaacgtgacacgcagtctctctccgttatcacagcagaactcgaacccgtcagagcaccatcgctgattgctttctttcacggccactctgcctgtatgtgcccgtttcgatggcggtacagcaggttttcgctcaagcaacagcgcattctggcgcatgatccggtaaacacgtttggcattgatcgcaggcataccatcaagttctgcctgtctgcgaagcagcgcccatacccgacgataaccatacgttggcagctctccgataacatggtgtatacggagaagcacatccgtatcatcagtgtgacgactgcggcggccatccatccagtcatcggttcgtctgagaatgacgtgcaactgcgcacgcgacacccggagacaacggctgactaagcttactccccatccccgggcaataagggcgcgtgcgctatccacttttttgcccgtccatattcaacggcttctttgaggagttcattttccatcgttttcttgccgagcaggcgctggagttctttaatctgcttcatggcggcagcaagttcagaggcaggaacaacctgttctccggcggcgacagcagtaagacttccttcctggtattgcttacgccagagaaataactggctggctgctacaccatgttgccgggcaacgagggagaccgtcatccccggttcaaagctctgctgaacaattgcgatcttttcctgtgtggtacgccgtctgcgtttctccggccctaagacatcaatcatctgttctccaatgactagtctaaaaactagtattaagactatcacttatttaagtgatattggttgtctggagattcagggggccagtctagaaattgggtcgcgtttcatacgattcggttatgccatcgacgcgtaaaggtttttaatggtttcccgtaaccagacgatcttcggattatggctgttccgtttatgccacagcagggtaaaaggaacttccagctttttttgctggctttcgtcaaacgggagaggaagagcaaccaacggcagttgatggagttgattgtagtactgacagtagcgcggcgcggtcgccagtagcagattgtcgggttgcgctgccataaacagtgactgctcgaattccggcaggctcatagcaatcgtgcgttcgcgtcccagctcctgtaacacattgtccagcgcccaggtatcgctctgttcccagcaaatgctgatatgcggataacgtaagaaggtgtccagattccacgtttgatgcagtgccggatgatctttgcgtaaccagacgcagggcacatcactaaacagcacttcataatcaatggctaacggtagcgagcttaacagctcccgcgagcgaggatggctttcgcgaccggaaaaaccgatatccacttcaccacgagtaatggcatctaaggaatcgtaatcccagttacgtaatttgatggtcgcctgcgggtaacgttggtagatctgtttcgacagcgcattaagcatgatcatcatcagcggtgattccgccgccagctcaaacttcaggccgcgcggtgtctggtggtgcggtttatccagcagcaggttgctcatttgcatccactccgccagattttgctccatgctgaccatcagcggtgtgggcgacagacccagcggtgagttcacaaagagcgggtcgtcaaaccacgctcttaactttgccagcgacttactcaccgccgaaggtgtcacgtttatccgcttcgccgctttggttacgctgcgctcctgcatcagcagttgcagacaaagcagcagattgagatcaagcgtggtgatggatttcttcatgagcggcaacggggcgtccaggcgcgacgaacataatcagcaacaggctcactatgctacaggcaatcagaatcccgatcagcatattccatgcgccgataccaaccaccgctgccagccaaatccacagtgacgaaccgcaaacctgcgcaatacctaaggtcgagctggctacgcccgcgcgtaatgaaaacggccctaacgcctgactcatcgccacaccaaaacctaccgagaaaccggcgcaaatcagcgtgataccaaacagagaaaccgcatgggaaggtgaaacggcaagagtgatccccgccgccaggaataacacctgcgaggtgatcatcaacgtacgtggcttaaaaattcccagcgcaaatggcgtggagaatgaaacggtcatgctgacgccagcggtcagcgccataatggtggcgtattcaccgcgctcaaaccccatgatttccatcagcaataccggtgacgtgttgacgaaagtgaggatcaccgaaacgctgagggtggtgataacaacacggctgaggaaaaaacggttaagcagcgactcgctattttctcgtggtttatccgaagctgcgggggccgctgggcgcgtttcttttaaaataaacaaagacaacatcagtaccgcgatgcccatcattgccatcgcccagaacagactctgccacgggaatttaagcataatcagatgtccgagcactggcgctaacaccggaatgatgcaggtaataccgttgagtaatgacagcactttagcccgacgtcgatcatccagcgtgtcgcgcaaaatagcgaacgccactacgtaacaacagcctgcgcccaacccctgtagaaatcggcctgcaagaaataacgtgctggtttcagccagtgaacagaacaccgaggcaataataaatagcgccgcgccgggtatggcgaccggctttctccctgaacgatcggccactttaccggcaaataacatcgcagctgccatccccgccagatatacggagaacgcaatatgcaactgcgcttcgctggcattgagatcggcggcgatgcgcggtaaaccaacgaggtacatatcaatcccggcgggataaagtaaaaccagggcaaaactacaaatcaaaaagcgggacatgggctaaagcgtcctgatagtaaggtgacgcaaagcatacgtggtgaaggaggatcaggcgagttgccatttggacataagtgatttcctgagaggcaagaagccagcgaatggctggcttcttgaaggatttagccaaatttaggtaacacgttaaagacgttgccgaaccagcacaaaatcacggttataccaaagagaatgacaatcgccggaataagattgccgccccagaccgtgaacatctgattgggaaacttcttgcgagctttgattgcaagcactgcgggaataatgaccgcccagatggtggcgcacagcccggcaccgccgatcccgtaaataaagccgttcgggaagatcagatacaacaacgcaggtggcaggaaggttaacagcacggttttgaaacgcccgccgtgggagttatcaatcttaaacaggtccgccagataatcgaacaaccccagcgtgacaccaaagaacgaactggcaacagctaagttagggaaggtgcgaacaagtccctgatatgagatcatgtttgtcatctggagccatagaacagggttcatcatgagtcatcaacttaccttcgccgacagtgaattcagcagtaagcgccgtcagaccagaaaagagattttcttgtcccgcatggagcagattctgccatggcaaaacatggtggaagtcatcgagccgttttaccccaaggctggtaatggccggcgaccttatccgctggaaaccatgctacgcattcactgcatgcagcattggtacaacctgagcgatggcgcgatggaagatgctctgtacgaaatcgcctccatgcgtctgtttgcccggttatccctggatagcgccttgccggaccgcaccaccatcatgaatttccgccacctgctggagcagcatcaactggcccgccaattgttcaagaccatcaatcgctggctggccgaagcaggcgtcatgatgactcaaggcaccttggtcgatgccaccatcattgaggcacccagctcgaccaagaacaaagagcagcaacgcgatccggagatgcatcagaccaagaaaggcaatcagtggcactttggcatgaaggcccacattggtgtcgatgccaagagtggcctgacccacagcctggtcaccaccgcggccaacgagcatgacctcaatcagctgggtaatctgctgcatggagaggagcaatttgtctcagccgatgccggctaccaaggggcgccacagcgcgaggagctggccgaggtggatgtggactggctgatcgccgagcgccccggcaaggtaagaaccttgaaacagcatccacgcaagaacaaaacggccatcaacatcgaatacatgaaagccagcatccgggccagggtggagcacccatttcgcatcatcaagcgacagttcggcttcgtgaaagccagatacaaggggttgctgaaaaacgataaccaactggcgatgttattcacgctggccaacctgtttcgggcggaccaaatgatacgtcagtgggagagatctcactaaaaactggggataacgccttaaatggcgaagaaacggtctaaataggctgattcaaggcatttacgggagaaaaaatcggctcaaacatgaagaaatgaaatgactgagtcagccgagaagaatttccccgcttattcgcaccttccttagagaacaccagcaggcaaaactcgataatgccgtgctgtttggtgccgaggaacgatttcaccagcgaatcaacgttgccgcctgaggagataatcgccttaaagctttctcgcggaatattccccatggtgcaatagagccagaagagataaatcaccagcgccagcagcgaaccaaataccacgcttttgattaacttatctttgcgttttccatagcaaataatcaggctgggaatattgccgtggaaaccaaatgacgccagacacaccggcaaagccataaagatatacgggaagtaagacgttcccgcagtggagctggtggcgtcgcgcagaatggagtaatcgacctggaagaaaaaagaaccaaacacgatcacaaaggagataatcttcagcccgaggaacaatgaggtaatacgactggcggctaacgaacttaaccacaatacgctggcaacgaaaatggctgtgcagatcccgacaatacgtggattagcgtgataacccaaattcattgatatcgtttcactaatgatcgcaccattagcagagatataggcataagtgaggatatagagaacgaaggcaacggtaataccgctgataatgttccaggtgttaccgattaaatctttggtgatggtgttaaaactggagccgacgggataatttaaatttgcttctaataacaataacccggaatgaagcattgaaaaccaggcaatgataaggataaaggcaccccagaaaaaccaggcaccggcaagatcaacaggtaaagcaaacatacctccaccaattactgtacctgctataaccataacaccccaaaatgcagagtgctttttttcagcttgatcagtcatgatgccacctttagaggaaggctatttttgttattgaggatgtagggtaagagagtggctaacatccttatagccactctgtagtattaattaaacttctttaagttttgcggtgaagtgacgcaatactttcggttcgtacgtaaaggttaatcctttaatattcgccgcgttctctttcacatgtttaaaggcttcaataatgaagtccatatgtgtttgagtatatgttgcgcgcggaatggttaaacgcagcagttcagccgggcatggcagttgtttaccggttttcggatcgcggcctaacaggaaagagccaatttctaccgcacggataccggcgactttatacagctcgcaggccagcgcctgtgccgggaactggtctgccgggatatgcggcaacagtttaccggcatcaacgaatgccgcgtgaccgcccgcctgctggcagacaacgccaatctcttccagaccatcgaccagatactgtacctgcgcgatacgataagccagccagtcgagattcatgccgtcatacagacctaccgccagacgctccatcgcgccgccttccaggccgccatatgtcgggaagccttcctgcaccacgcaaagggttctgcactcggtgtacacatcaaagaagctgtcgtctttcatgcacagcaggccgcccatcggcaccatcgcatctttcttggcggacatcgccagcatatcggcatatttgtaggtttcgcgggtgatctgctcgatggtccagtctttgtattctgcttcacgctgcttgatgaaataggcgttttcagcaaagcgcgcggagtccattaccaccggaatatcgtatttcttcgcgatgctgtacatcgcttttaagtttgccagtgaaaccggctgaccacctgcagagttactggtgatggttgcaacgatatacggcacgttattcggaccaacttcttcaataccgcgttctaatccctcaaggtcaaagttgcctttaaagtcgtaacgcacgcccgtatcgaaggcttctttgatatagacgttacgcacggtacagccgttgatctggctatggccctgcgtggtatcaaagaaatagttagagaacgccaccattttgctgcgatccaggcctttttcctgctcgcgttttttaatcagtaccggaatatagatttgctctgcgccacggccctggtgagtcggaatggtgtattgataaccaaagatatttttcactgactcggctaacgcatagtagctacgactgccgctgtaggcttcgtcgccgcgcatcatcgcagcctgcatgctctgcgtcaccgccccggtgccgctgtcggtcagtaaatcgataaaaacatcttcgctatccagcaggaacgggttcataccggatttaataattgcctcttcacgataagcgcgagtggtacgttttactggctcaataacacgaatgcggaacggttcagggagatgtttaaagttttccattacataatccttcatttattttaattacagtgatccctgtgaatattacatctgctataccgattaattcgccagatatatatgcaagcaccatcatttactaaggaaggtgcgaacaagtccctgatatgagatcatgtttgtcatctggagccatagaacagggttcatcatgagtcatcaacttaccttcgccgacagtgaattcagcagtaagcgccgtcagaccagaaaagagattttcttgtcccgcatggagcagattctgccatggcaaaacatggtggaagtcatcgagccgttttaccccaaggctggtaatggccggcgaccttatccgctggaaaccatgctacgcattcactgcatgcagcattggtacaacctgagcgatggcgcgatggaagatgctctgtacgaaatcgcctccatgcgtctgtttgcccggttatccctggatagcgccttgccggaccgcaccaccatcatgaatttccgccacctgctggagcagcatcaactggcccgccaattgttcaagaccatcaatcgctggctggccgaagcaggcgtcatgatgactcaaggcaccttggtcgatgccaccatcattgaggcacccagctcgaccaagaacaaagagcagcaacgcgatccggagatgcatcagaccaagaaaggcaatcagtggcactttggcatgaaggcccacattggtgtcgatgccaagagtggcctgacccacagcctggtcaccaccgcggccaacgagcatgacctcaatcagctgggtaatctgctgcatggagaggagcaatttgtctcagccgatgccggctaccaaggggcgccacagcgcgaggagctggccgaggtggatgtggactggctgatcgccgagcgccccggcaaggtaagaaccttgaaacagcatccacgcaagaacaaaacggccatcaacatcgaatacatgaaagccagcatccgggccagggtggagcacccatttcgcatcatcaagcgacagttcggcttcgtgaaagccagatacaaggggttgctgaaaaacgataaccaactggcgatgttattcacgctggccaacctgtttcgggcggaccaaatgatacgtcagtgggagagatctcactaaaaactggggataacgccttaaatggcgaagaaacggtctaaataggctgattcaaggcatttacgggagaaaaaatcggctcaaacatgaagaaatgaaatgactgagtcagccgagaagaatttccccgcttattcgcaccttccctaaaacaagtaaataaacgagagatgacctttgcaaaaggcaaaattaagatatagcaaacaaatagatcacattgaatctaatcggtttggctctggtgatggctacagaagggcaaatcaagggcggtgatcgacaattttgttgtcaatattgaaccattttgaggtcacacatatatgtaagatattcataatgcacttatcctcgcaagacacgaggctacattattacactcagagtttttgtctattctgaaattgtttaaatgtgaatcgaatcacaatcgttcggggagcaatattaaatgctttttttaaagattataaattacgtaagaattttaatgtttaaaaaaagggttgaggaataacaggagtggtaacaatgaagcgaagccgcatctgacagtcagaatgcggcttcgtaagcgcggttacttaccaatacagaagctggagaaaatccgccccagcaggtcgtctgaagtaaattccccggtgatttcgcttaagttctgctgtgccagacgcaactcttccgccagcagttcacctgcccaggctcccaacagttgcgctttgccctgttgtagatgttccgctgcctgttccagcgcctgtaggtggcgacgacgcgccaggaagccgccttccatgttggtgtcaaagcccatgctctgtttgagatggttacgcagcacgtccacgccttcaccagtccttgccgagagacgaattaacgcgtgaccgttcacttcactcattcccagcgtttcgccggtgatatcggctttattgcgcaccacggtgatcggcagtttcgctggcagacgggcaataaattccggccagatctctgccggatccacggcgtctgttgtggtgccatcgaccataaacagcacgcggtcggcctgttcaatttcctgccacgcgcgctcgataccaatacgttctacttcgtcactggcttcacgtagcccggcggtatcgatgatatgcagcggcattccgtcaatgtggatatgctcacgcagcacgtcacgcgtagttccggcgatatcggttacgattgccgcttcacgccccgccagcgcgtttaacaggctcgatttaccggcgttaggacgtccggcaatcaccactttcatcccttcgcgcaacaaactaccctgacgtgcttcagcacgcactgcatcaagatcggcaataacgtcattgagctgggcttcaatttttccgtcggagaggaaatcgatctcttcatcggggaaatcaattgccgcttcgacgtaaatgcgcaagtgggtgagggcttctaccagatgattaacccgtgcggagaatgcgccttgcagcgagttaagtgccgaacgggccgcctgttccgaactggcgtcgataagatcggcaatcgcctcggcctgggctaagtcaagtttatcgttaagaaacgcgcgttcggaaaactcaccagggcgagcaatccgcaggccgggaatggtcagaatgcgttttaacagcaggtcgaggatcaccggaccgccatgaccttgcagttccagcacatcttcgccggtgaacgagttcgggccagggaaccatagcgcaatcccctgatcgagcacgctgccgtcggcgtctttaaacggaagataatcggcgtagcgcggcttaggcagtttacccagcacggtttcggcaacttcacgggctttgaagccggagatgcgcaggatgccaacgccgccacgtcccggaggcgtggcctgggctacgatagtgtcattatcgctcatgatgttcctgttgctttgtgtggcggatgcgcggtgcttatccgccctacgaaaagaaaaaaggcggtcaactgaccgcccttattttagcgaaaactcaccgaatcaggattttttcttctcgcggctatgcaggccacgtttttccagaccacggtaaatcagctgctgctgaataatggttaccaggttgctgacgatatagtacagcaccagacctgacgggaaccacaggaagaacacggtgaagatgaccggcataaaggtcatgatcttctgctgcatcgggtcggtcactgtggtcggcgacatcttctgaatgaagaacatcgttacgcccatcaggatcggcaggatgtagtacgggtcctgtgccgacaggtcgtggatccacagtgcaaacggtgcctgacgcagttcaacggaacccatcagcatgtagtacaacgccaggaagattggcatctggatcagcagcgggaagcagccgcccagcgggttaaccttctcagctttgtacagcgccatcatttcctggctgatacgctgtttgtcatcgcccagacgctcacgcattgcctgaatcttcggctgcaacatacgcatcttcgccatggaggtgtactgcgctttggtcagcgggtacatgatgccacgaacgataaaggtgatgatgataatggagaagccccagttacccacaaagctatggatccatttcagcagtttgaacagcggctgagagatgaaccacaaccaaccgtaatcaacggtcagatccaggtgcggagcaacagctgccattttgtcctggatttccgggccaacccacagggtgctgttcatcgcgccagtctgaccaggctgaaccagtaccggctgagatttatagccgatagcggcgatgccgttacccagattagcggtatagaagttgttggtaccgtcgttatgcgggatccacgccgtcgcgaaatactgttgcagcatcgccacccaaccacctttcgaagagatgttcaggttttcgttatcggcaatggtatcgaacttgtatttctcatacttctcgtcaggcgtggagtacgccgcgccacggaaggtgtgcagtgcgaagttgctgcttccggtatcgagatgcggtggcagagtgatggattgcttcaactgaccaaacgaggagatttccagcggtttctcgccagcgttctgcacgttgtagttgacgttgacagcgtaatcaccacgtttcaggacaaacgttttggtaaacgtgttgcctgccgcgtcggtatacgtcatcggcacctgcagttcgttttgaccttcagccagcacataagcgtctttttcaacgttatacagcggacgcgggccgttagccgggttatccgggccatcacgaccggtcagaccgctctgtgcctgataaataaactgcggtgaagtttccaacagctggaacggctgggtagagttcagctctttcgggtaagcaggcagcagagcttgctcaacatcaccaccacgggtgttgatggtcagatcaagcacgtcggtcttaaccgagatcagtttcccctggccactggccggtacgccctggtcggcggcgctacccgctgcggtggtcgttgtctgcgtggtctgttgggcctgaggttgcgggtttttatcctgctcccaggcttgccagatcatgaaagacacgaacagcaaagcgatgactaaaagattgcgttgcgaatccatcgttagtgttctctggtatcaaatggtccgggcgggacgggatcgtcaccaccagggtgtaaagggtggcattttaatacgcgtttcaccgtcaaccaactgccttttatcactccaaacctgcgcaatgcctcaattccgtagcttgaacaggttggagtgaaacgacaatgcggcccgagtagcggactaatcaggcgttgatagacccgaatgagggctatcaggacccgcgagccaggcgacagtggcggcgccataatttttccaacgcttccgagagagcacggttatcgaggtcggcaaccccttttttcgccaccaccacgaaatccatagccgggagttcatgttggcgcagacggaagctttcacgcgtcagacgtttaatccgattgcgttcatgggcgcgtcgaacgtttttcttggcgactgtaagaccgatacggggatgccccagcgaattcaggcggccgagaatggtaatttgcggcgtgccagcccgttgtggctgctggaagacgaatgtgaattgactgggagttaacaagcgtaactccctgggaaatgcgagcttaaccactcaggggttagctttattacttagaaacggtcagacgagcgcggcctttagcacgacgacgtgccagaacctgacgaccatttttagtagccatacgagcacggaagccgtgagaacggttgcgcttcagtacagacggttgaaaagtgcgtttcatggcgatttctacctaaacttgaataaattcaatggctttattggatatccgccgaaaaatgaaacgatggacaccgaagccatgggtgattaaagaggccggattgtaataattgtacactccggagtcaattctctttccttatttaccgcgcttttccgcaccttttcgcagggaaaatgtacgacctcacaccagtggaaaccagcatggcgcgccgggtggaggattatacgggctgatgggtaaagcgcaaggatcgtcctggatctttattagatcgattaagccaatttttgtctatggtcattaaattttccaatatgcggcgtaaatcgtgcccgcctcgcggcaggatcgtttacacttagcgagttctggaaagtcctgtggataaatcgggaaaatctgtgagaaacagaagatctcttgcgcagtttaggctatgatccgcggtcccgatcgttttgcaggatcttgatcgggcatataaccgcagacagcggttcgtgcgtcaccctcaagcagggtcttttcgacgtacgtcaacaatcatgaatgtttcagccttagtcattatcgacttttgttcgagtggagtccgccgtgtcactttcgctttggcagcagtgtcttgcccgattgcaggatgagttaccagccacagaattcagtatgtggatacgcccattgcaggcggaactgagcgataacacgctggccctgtacgcgccaaaccgttttgtcctcgattgggtacgggacaagtaccttaataatatcaatggactgctaaccagtttctgcggagcggatgccccacagctgcgttttgaagtcggcaccaaaccggtgacgcaaacgccacaagcggcagtgacgagcaacgtcgcggcccctgcacaggtggcgcaaacgcagccgcaacgtgctgcgccttctacgcgctcaggttgggataacgtcccggccccggcagaaccgacctatcgttctaacgtaaacgtcaaacacacgtttgataacttcgttgaaggtaaatctaaccaactggcgcgcgcggcggctcgccaggtggcggataaccctggcggtgcctataacccgttgttcctttatggcggcacgggtctgggtaaaactcacctgctgcatgcggtgggtaacggcattatggcgcgcaagccgaatgccaaagtggtttatatgcactccgagcgctttgttcaggacatggttaaagccctgcaaaacaacgcgatcgaagagtttaaacgctactaccgttccgtagatgcactgctgatcgacgatattcagttttttgctaataaagaacgatctcaggaagagtttttccacaccttcaacgccctgctggaaggtaatcaacagatcattctcacctcggatcgctatccgaaagagatcaacggcgttgaggatcgtttgaaatcccgcttcggttggggactgactgtggcgatcgaaccgccagagctggaaacccgtgtggcgatcctgatgaaaaaggccgacgaaaacgacattcgtttgccgggcgaagtggcgttctttatcgccaagcgtctacgatctaacgtacgtgagctggaaggggcgctgaaccgcgtcattgccaatgccaactttaccggacgggcgatcaccatcgacttcgtgcgtgaggcgctgcgcgacttgctggcattgcaggaaaaactggtcaccatcgacaatattcagaagacggtggcggagtactacaagatcaaagtcgcggatctcctttccaagcgtcgatcccgctcggtggcgcgtccgcgccagatggcgatggcgctggcgaaagagctgactaaccacagtctgccggagattggcgatgcgtttggtggccgtgaccacacgacggtgcttcatgcctgccgtaagatcgagcagttgcgtgaagagagccacgatatcaaagaagatttttcaaatttaatcagaacattgtcatcgtaaacctatgaaatttaccgtagaacgtgagcatttattaaaaccgctacaacaggtgagcggtccgttaggtggtcgtcctacgctaccgattctcggtaatctgctgttacaggttgctgacggtacgttgtcgctgaccggtactgatctcgagatggaaatggtggcacgtgttgcgctggttcagccacacgagccaggagcgacgaccgttccggcgcgcaaattctttgatatctgccgtggtctgcctgaaggcgcggaaattgccgtgcagctggaaggtgaacggatgctggtacgctccgggcgtagccgtttttcgctgtctaccctgccagcggcggatttcccgaacctcgatgactggcagagtgaagtcgaatttaccctgccgcaggcaacgatgaagcgtctgattgaagcgacccagttttctatggcgcatcaggacgttcgctattacttaaatggtatgctgtttgaaaccgaaggtgaagaactgcgcaccgtggcaaccgacggccaccgtctggcggtctgttcaatgccaattggtcaatctttgccaagccattcggtgatcgtaccgcgtaaaggcgtgattgaactgatgcgtatgctcgacggcggcgacaatccgctgcgcgtacagattggcagcaacaacattcgcgcccacgttggcgactttatcttcacctccaaactggtggatggtcgcttcccggattatcgccgcgttctgccgaagaacccggacaaacatctggaagctggctgcgatctgctcaagcaggcgtttgctcgcgcggcgattctctctaacgagaaattccgcggcgtacgtctttatgtcagcgaaaaccagctgaaaatcaccgccaacaacccggaacaggaagaagcggaagagatcctcgacgttacctatagcggtgcggagatggaaatcggcttcaacgtcagttatgtgctggatgttctgaacgcgctgaaatgcgaaaacgtccgcatgatgctgaccgattcggtttccagcgtgcagattgaagatgcggccagccagagcgcggcttatgttgtcatgccaatgagactgtaatgtccctcacccgcttgttgatccgcgatttccgcaacattgaaaccgcggatctcgccttatctcccggctttaactttctggtaggtgccaacggcagtggcaaaaccagcgtgctggaagccatctatacgctcggccatggtcgggcgtttcgcagtttgcagattggtcgcgtcattcgccatgagcaggaggcgtttgttctccacgggcgattacagggcgaagagcgcgagacagcgattggcttaaccaaagacaaacagggcgacagcaaagtccgcatcgacggtacagacgggcataaggtcgcggaactggcgcacctgatgccaatgcagttgataacgccagaagggtttactttactcaacggcggccccaaatacagaagagcattcctcgactggggatgctttcacaacgaacccggatttttcaccgcctggagcaatctcaagcgattgctcaagcagcgcaatgcggcgctgcgccaggtgacacgttacgaacagctacgcccgtgggataaagagctgatcccgctggcggagcaaatcagcacctggcgcgcggagtatagcgccggtatcgcggccgatatggctgatacctgtaagcaatttctccctgagttttctctgactttctctttccagcgcggctgggagaaagagacagaatatgctgaggtgctggaacgtaattttgaacgcgatcgccagctaacctacaccgcgcacggcccgcacaaagcggacttacgcattcgcgccgacggtgcgccggtggaagataccttatcgcgtgggcagcttaagctgttgatgtgcgccttacgtctggcgcaaggagagttcctcacccgtgaaagcgggcggcggtgtctctacctgatagatgattttgcctctgagcttgatgatgagcgtcgcgggctgcttgccagccgcttaaaagcgacgcaatcacaggtctttgtcagcgcgatcagtgctgaacacgttatagacatgtcggacgaaaattcgaagatgtttaccgtggaaaagggtaaaataacggattaacccaagtataaatgagcgagaaacgttgatgtcgaattcttatgactcctccagtatcaaagtcctgaaagggctggatgcggtgcgtaagcgcccgggtatgtatatcggcgacacggatgacggcaccggtctgcaccacatggtattcgaggtggtagataacgctatcgacgaagcgctcgcgggtcactgtaaagaaattatcgtcaccattcacgccgataactctgtctctgtacaggatgacgggcgcggcattccgaccggtattcacccggaagagggcgtatcggcggcggaagtgatcatgaccgttctgcacgcaggcggtaaatttgacgataactcctataaagtgtccggcggtctgcacggcgttggtgtttcggtagtaaacgccctgtcgcaaaaactggagctggttatccagcgcgagggtaaaattcaccgtcagatctacgaacacggtgtaccgcaggccccgctggcggttaccggcgagactgaaaaaaccggcaccatggtgcgtttctggcccagcctcgaaaccttcaccaatgtgaccgagttcgaatatgaaattctggcgaaacgtctgcgtgagttgtcgttcctcaactccggcgtttccattcgtctgcgcgacaagcgcgacggcaaagaagaccacttccactatgaaggcggcatcaaggcgttcgttgaatatctgaacaagaacaaaacgccgatccacccgaatatcttctacttctccactgaaaaagacggtattggcgtcgaagtggcgttgcagtggaacgatggcttccaggaaaacatctactgctttaccaacaacattccgcagcgtgacggcggtactcacctggcaggcttccgtgcggcgatgacccgtaccctgaacgcctacatggacaaagaaggctacagcaaaaaagccaaagtcagcgccaccggtgacgatgcgcgtgaaggcctgattgcggtcgtttccgtgaaagtgccggacccgaaattctcctcccagaccaaagacaaactggtttcttctgaggtgaaatcggcggttgaacagcagatgaacgaactgctggcagaatacctgctggaaaacccaaccgacgcgaaaatcgtggttggcaaaattatcgatgctgcccgtgcccgtgaagcggcgcgtcgcgcgcgtgaaatgacccgccgtaaaggtgcgctcgacttagcgggcctgccgggcaaactggcagactgccaggaacgcgatccggcgctttccgaactgtacctggtggaaggggactccgcgggcggctctgcgaagcaggggcgtaaccgcaagaaccaggcgattctgccgctgaagggtaaaatcctcaacgtcgagaaagcgcgcttcgataagatgctctcttctcaggaagtggcgacgcttatcaccgcgcttggctgtggtatcggtcgtgacgagtacaacccggacaaactgcgttatcacagcatcatcatcatgaccgatgcggacgtcgacggctcgcacattcgtacgctgctgttgaccttcttctatcgtcagatgccggaaatcgttgaacgcggtcacgtctacatcgctcagccgccgctgtacaaagtgaagaaaggcaagcaggaacagtacattaaagacgacgaagcgatggatcagtaccagatctctatcgcgctggacggcgcaacgctgcacaccaacgccagtgcaccggcattggctggcgaagcgttagagaaactggtatctgagtacaacgcgacgcagaaaatgatcaatcgtatggagcgtcgttatccgaaagcaatgctgaaagagcttatctatcagccgacgttgacggaagctgacctttctgatgagcagaccgttacccgctgggtgaacgcgctggtcagcgaactgaacgacaaagaacagcacggcagccagtggaagtttgatgttcacaccaatgctgagcaaaacctgttcgagccgattgttcgcgtgcgtacccacggtgtggatactgactatccgctggatcacgagtttatcaccggtggcgaatatcgtcgtatctgcacgctgggtgagaaactgcgtggcttgctggaagaagatgcgtttatcgaacgtggcgagcgtcgtcagccggtagccagcttcgagcaggcgctggactggctggtgaaagagtcccgtcgcggcctctccatccagcgttataaaggtctgggcgagatgaacccggaacagctgtgggaaaccactatggacccggaaagtcgtcgtatgctgcgcgttaccgttaaagatgcgattgctgccgaccagttgttcaccacgctgatgggcgacgccgttgaaccgcgccgtgcgtttattgaagagaacgccctgaaagcggcgaatatcgatatttaatggcgctaaccatgcgagcgtgcctgatgcgctacgcttatcaggcctacgaaaatcttgcaatgtattgaattttcatgattttgtaggccggataaggcgttcacgccgcatccggcaagaagctataagaaaagggcggagatcatctccgccctttttatttctgcaatccgcaattatcatcccgcaaatctatactttttgggtcaacacgtaacgctttacaggtgattatcatggggctttttgatgaagttgtcggtgcctttctgaaaggcgatgcggggaaatatcaggctattttaagttgggttgaggagcagggcggcattcaggtgctgctggaaaaactgcaaagtggcggcttaggggccattctctcaacctggctgagtaatcaacagggcaatcaatcggttagtggcgagcaactggaatcggcgctcggcacaaatgcggtgtccgatctcgggcaaaaacttggcgtggataccagtacagcttccagtttactggcagaacaattgccgaagattattgatgcgctctcaccgcaaggtgaagtgtcaccacaagccaataacgatctgctttccgcaggcatggaactgctgaaagggaaactcttccgctaagcaaaaagggagcacgcaacgcgcgttgcatcccccttttccctcgggtgttgtactgatttttgagcggaatcgcgttagcatgggtcaggaaccaatctacctggggaactcatggctattaaactcattgctatcgatatggatggcacccttctgctgcccgatcacaccatttcacccgccgttaaaaatgcgattgccgcagctcgcgcccgtggcgtgaatgtcgtgctaacgacgggtcgcccgtatgcaggtgtgcacaactacctgaaagagctgcatatggaacagccgggcgactactgcattacttataacggcgcgctggtacagaaggccgctgatggtagcaccgtggcgcaaactgctctcagctatgacgactatcgtttcctggaaaaactctctcgcgaagtcggttctcatttccacgccctggaccgcaccacgctgtacaccgccaaccgtgatatcagctactacacggtgcatgaatccttcgttgccaccattccgctggtgttctgcgaagcggagaaaatggaccccaatacccagttcctgaaagtgatgatgattgatgaacccgccatcctcgaccaggctatcgcgcgtattccgcaggaagtgaaagagaaatataccgtgctgaaaagtgcgccgtacttcctcgaaatcctcgataaacgcgttaacaaaggtacgggggtgaaatcactggccgacgtgttaggtattaaaccggaagaaatcatggcgattggcgatcaggaaaacgatatcgcaatgattgaatatgcaggcgtcggtgtggcgatggataacgctattccttcagtgaaagaagtggcgaactttgtcaccaaatctaaccttgaagatggcgtggcgtttgctattgagaagtatgtgctgaattaatctgtgggcgggcaaacagcataaacgcgtttgcccgcttactgattattggtttactgcatatacaaccagaaattgcagcggtgcagtaatgatgtccagcgtaacagtcactggcagtaatgctgcggaaacaccatccggaatgcctctgggtgaatagtattcataaaatcgcactttaaatggatggtagaacgccatcacctttgagtaatccatgtttttatttttctcatggattgtgccttttaggttttccagtgacctggtacagtgttgaacaccacaggcaaaaccataatgcgttgccagtgccttttcttcttcgttattccagtagtagtaaagcgatattgtgccggtaaatttctttttccccgcatttaaaacaaatcttgcgtcatcggcaacctgaatattgtgccggttaagtgctggatcattgagcatcttaacgatgtcatcggcaccatcagtgataaggtaatccagcgattcccctacaaaaacatagccttttgttccattactatcttttgcctgcgatagcccagtgatggtgtctgactgcgattgatactttcctgaactaccctttgcggtatgggaaaccagagcatacgagatacagcctgaaagcatcagcgccagtgggaataaaccggcagccttaaaaaatcccttaaaattcaacttcatgattaatcctttaaacgagtagctaagccgttgaaagcatactcttctttccctcctgtttagcgcctgatatcccttttcagatttctgcccgacgcatgtcatttttttatgcattgttctttttgtgatctaaattgtagtacaacaatataagtttgtactacattacacgcacggcaaacgcgaacgtcatcacgctggtactacaaagttgccgcgttatgcatcgatcggggtaaagtagagaagaacatacagagcacaaggactctccatgactctcaataaaaccgatcgcattgtcattacgctgggtaaacagatcgttcacggcaaatacgtgccaggctcgccgcttccggctgaggcggaactctgtgaggagtttgcaacctcgcgcaacatcatccgtgaggtgttccgttcgctgatggcgaagcggctgattgaaatgaaacgttatcgcggggcgtttgtggcaccgcgtaaccagtggaattacctcgacactgacgtactgcaatgggtgctggaaaatgactacgacccacggcttatcagtgccatgagcgaagtgcgaaatctggtggaaccggcgattgcccgttgggcagcagagcgcgcgacttccagcgatctggcgcagattgaatcggcgctgaacgagatgattgccaacaatcaggaccgcgaagcgtttaacgaagcggatattcgctaccacgaggcggtgctgcagtcggtgcataacccggtgttacagcaacttagcattgcgatcagttcgctgcagcgggcggtttttgaacgaacctggatgggcgatgaggccaacatgccgcaaacgctccaggaacataaggcgctgttcgatgcgatacgacatcaggacggcgatgcggcagagcaggcggcgcttaccatgatcgccagctcgacacgaaggttaaaggaaatcacatgacagctcgctacatcgcaattgactggggatcgaccaatctgcgcgcctggctttatcagggcgaccactgcctggagagcaggcaatcagaagcaggcgtcacgcgcctgaacggaaaatctccggctgcggtgttagcagaagtcacgaccgactggcgtgaagagaaaacgccagtggtaatggcaggaatggttggcagcaacgtcggctggaaagttgcaccgtatttatctgttcctgcctgtttttcgtctattggcgaacaattaacgtcagttggcgacaatatctggattattcccggattatgtgtctctcatgacgataaccacaatgtgatgcgcggcgaagaaacacaattgatcggcgcgcgagctctggctccttcctctctttatgtcatgcccggaacccattgcaaatgggtgcaggccgatagccagcaaatcaacgattttcgcaccgtgatgaccggtgaattacatcatttactgttaaatcactcattgattggcgcaggtttgccgccgcaggaaaactctgccgatgccttcacagctggccttgagcgtggtcttaatacgcccgccatattgccgcagctttttgaagttcgcgcctcgcatgtgctgggaacacttccccgcgaacaggtcagcgaatttctctctggtttgttgattggcgcagaggtcgccagtatgcgcgactatgtggcccatcaacacgccatcacccttgtcgccggaacatcgctgaccgcgcgctaccagcaagcctttcaggcgatgggttgcgacgtgacggcggtggcgggcgacacggcatttcaggctggtataaggagcatcgctcatgcagtggcaaactaaactcccgctgatcgccattttgcgcggtattacgcccgacgaggcgctggcgcatgttggcgcggtgattgacgccgggttcgacgcggttgaaatcccgctgaattccccacaatgggagcaaagcattcccgccatcgttgatgcgtacggcgacaaggcgttgattggcgcaggtacggtactgaaacctgaacaggtcgatgcgctcgccaggatgggctgtcagctcatcgttacgcccaatatccatagtgaagtgatccgccgtgcggtgggctacggcatgaccgtctgccccggctgcgcgacggcgaccgaagcctttaccgcgctcgaagcgggcgcgcaggcgctgaaaatatttccgtcatcggcttttggtccgcaatacatcaaagcgttaaaagcggtattgccatcggacatcgcagtctttgccgttggcggcgtgacgccagaaaacctggcgcagtggatagacgcaggttgtgcaggggcgggcttaggcagcgatctctatcgcgccgggcaatccgtagagcgcaccgcgcagcaggcagcagcatttgttaaggcgtatcgagaggcagtgcaatgaaaatcaccaaaattaccacgtatcgtttacctccccgctggatgttcctgaaaattgaaaccgatgaaggcgtggtcggttggggcgagcccgtgatcgaaggccgcgcccgtacggtggaagcggcagttcacgagctgggtgactatttgattggtcaggatccatcgcgcatcaatgacttatggcaagtgatgtatcgcgccggattctatcgcggcggtccgatcctgatgagcgccatcgccgggattgaccaggcgttatgggatatcaaaggtaaagtgctgaatgcgccggtctggcaactgatgggcggcctggttcgcgacaaaattaaagcctacagttgggttggcggcgatcgtccggcggatgttatcgacggcattaaaacgctacgcgaaatcggcttcgataccttcaaactgaacggttgtgaagaactggggctaattgataactcccgcgcggtagatgcggcggttaacaccgtggcacaaattcgtgaagcttttggcaatcagattgagtttggtcttgatttccacggtcgcgtcagcgcgccgatggcgaaagtgctgattaaagaactggagccgtatcgcccgctgtttattgaggagccggtgctggcggaacaagccgaatactacccgaaactggcggcacaaacgcatattccactggcggcgggtgaacgcatgttctcacgcttcgattttaaacgcgtgctggaggcaggtggtatttcgattctgcaaccggatctctcccacgcgggcggtattaccgaatgctacaaaatcgccggaatggcagaagcctatgacgtgacccttgcgccgcactgtccgctcggaccgattgcactggcggcttgcctgcatatcgactttgtttcctataacgccgtacttcaggaacaaagtatgggaattcattacaacaaaggcgcggagttactcgactttgtgaaaaacaaagaagacttcagcatggtcggcggcttctttaaaccgttaacgaaaccgggcttaggcgtggaaatcgacgaagctaaagtgattgagttcagtaaaaatgccccggactggcgtaatccgctctggcgtcatgaagataacagcgtagcagagtggtaattcctgccacgtaagcccctcatcgggcactaaaacagcaatacaaaaatataaccctctgtaaattacagggcatggtgagcggcttcgctatgcccaaaatctggagaaagctcgctatggatattcccgttaatgcagcaaagccggggcgtcggcgttatctgacgctggtgatgatctttattacggtagtcatttgttatgtcgaccgcgccaacctggccgtggcttccgcccatattcaggaagagttcggcattaccaaagcggaaatgggctatgtattttcggccttcgcctggctttatacgctatgtcagatccccggcggttggtttttagatcgcgtaggttctcgcgtgacttattttattgcgatatttggctggtcagtggcgactttattccagggctttgccacgggcttaatgtcattaattggtctgcgcgcgataaccggtattttcgaagcgcctgctttcccgaccaataaccggatggtgaccagctggttcccggaacatgaacgcgcttctgccgttggtttttatacgtctggtcagtttgtcggtctggcgtttctgacgccgctgctgatctggattcaggagatgttgagctggcactgggtgttcattgtcactggtggtatcggcattatctggtcgctgatttggtttaaggtttatcagccgccgcgcctgaccaaaggtatcagcaaagctgaactggattacattcgtgatggcggcggtctggtggatggtgatgcgccggtgaagaaagaggcgcgtcagccgttaacagccaaagactggaaactggtgttccatcgtaaactgatcggcgtttatcttgggcaatttgcggtggcttctacactgtggtttttcttaacctggttcccgaactatttaacccaggaaaaaggaatcacggcgctgaaagcaggctttatgaccacggtgccattcctcgcggcgtttgtcggcgtcctgctctctggctgggtagcggatctgctggtacgtaagggcttttcactgggctttgcgcgtaaaacgccgattatctgcggcttgctgatctccacctgcattatgggcgctaactacactaacgatccgatgatgattatgtgcctgatggcgctggcattcttcggtaacggttttgcttcgattacctggtcgctggtttcttctctggcaccgatgcgcctgattggtttaaccggcggcgtgtttaacttcgccggtggtctgggcggcatcaccgttccgctggtggtggggtacctggcgcagggttacggtttcgcacctgcactggtttatatctccgccgtcgcgttgattggcgcgctctcttatatcctgctggtgggcgatgtgaagcgcgttggctaatccttcaactgtggaatatgtgccacaccactgcgcataatccactttcttaaagccggtgcggtcaggcatcggctttttactatcttgccgaagagttttaaacgcagtttgcgggtggcgcgccagtaagcggtattgagcttctctggctgcttcagtaacaccgaacgcagaatgtctgtgctatccagcgcatagctaatcccctccagcgagctggcgctgataaatcccgccgcttcaccaatcagaaaggcgttgtccttaccgcagacaaaatcctgccagcgcgagggaaacagcaccgtgcatttttcgcttttcaccgtcttaccaaactggaactgaaaggcgctcattttctctttcagcgtcgtgaaacgcgtctgaccgtctttcattggataggcaccgccaaagataaaataaccgtctttgctgatactccatgaataacagttagttatcgaattatcaaagatgcaggagtagaacggcaccggatgtttctccgcgaaccactgctggatagcgacatatttacggatttgatgatccgggtagagatgtcgccgcaccatcgagtttgcgccatcggcaccgaccagatagcgggcggtaatatgttgctcccagccgtctgcacgaaaaatgacatgccatttatcatcctcacgccagatttttcggcacaggctgtcgtgataaacctcaacgctggcggggatcagcgatttcatccacaagtcgaaagcatggcgattaatattgatatagcttcgctggtagttacgcgtgagcgatgcggcgacgtcgacggttttgacgctgaaaatctgcggattagcgatcacatcgacaggaagcgtcagcccatcgcgaataaaagatcgctgcgcgtccggtgccagcagaccgccgcagggtttgctgaaaccttcagtaccacactggtgctttttatccagcgcgatcacctgcattttgcctgctaactttcgtgccaacgccgatcctgccgggccgaggccaataatcgccacgtcgaaatgttccatcttttcactcacattcatcacgatggcaaaagactattgtctgaaagtgaagtccttgtgaagtatgatggcgggacccgttttgtatcaggaccgcgccatgaaacagataacctttgctccccgtaatcacctgctcaccaataccaatacctggacgcccgacagccagtggctggtatttgacgtgcgtccttctggcgcgtcgtttaccggcgagaccattgagcgtgtgaatatccataccggcgaggtcgaggttatctatcgcgcgtcacagggcgcacacgtcggcgtggtgaccgttcatccgaagtcagagaaatatgttttcatccacggcccggaaaatcctgatgaaacatggcattacgacttccatcatcggcgcggagtgattgttgaaggcggcaagatgagtaaccttgatgcgatggatattaccgcgccgtatacgccaggagtgctgcgcggcggcagccatgtgcatgtctttagcccgaacggtgaaagggtgagctttacctataacgaccatgtaatgcatgaactcgatccggcgctggatttgcgaaacgtcggtgttgctgcgccgtttggcccggtcaacgtacaaaagcagcatccgcgtgaatacagcggtagccactggtgcgtgctggtgagcaaaaccacgcccacgccacagcctggcagtgatgaaatcaatcgtgcttatgaagaaggatgggtaggaaatcacgcgctggcatttattggcgacacactttcgccaaagggcgagaaagtgccggagctgtttatcgttgagttaccgcaagatgaagctggctggaaagcggcaggtgatgcgccgttaagcggaacggaaacaaccctgcccgcgccaccgcgtggcgtcgtgcagcgacgtttaacctttacccaccatcgggcttatccggggttagtcaacgtcccgcgccactgggtgcgctgtaatccgcagggtacacaaatcgcgtttttaatgcgagatgataacggcattgtgcaactgtggcttatctcgccacagggcggcgagccgcgccagttaacccataacaaaacggatattcagtctgcatttaactggcatccgtcaggagaatggttgggctttgtgctggataatcgaattgcttgtgcccatgcgcaaagcggcgaggttgagtatttaaccgaacaccacgccaattcaccttctgcggacgccgtggtcttctcgccggatggtcagtggctggcgtggatggaaggcggccagctgtggatcaccgaaactgatcgctaaatcagttatcaggcattctggccggtggaataaccgcattggtggcttgcgcgttggcttcgcttttttcaacgcgcgagcgcaccgagctgtctttgcggaacacatcccacggcagtaaaagcgtgtccatcacagcggtaaacggcatatcgagaatcgccagcgacttagtgccccagttggtttcatcgtcgccaatcatggttgcgctggcgcgggtgccgggatacgttccttctttccctccggtatgggacatcacgctggagcatcctccgagtaatgtcattccgctgcatatcatgaacgctaacaacacatttcttatcataataaattcatctgttgatcgtgggtgttggcctgatgagttatagcgatcccttgctgaaaataacatcatcattacgtcgcactgtggcggctatcgcactttaacgtttcgtgctgccccctcagtctatgcaatagaccataaactgcaaaaaaaagtccgctgataaggcttgaaaagttcatttccagacccatttttacatcgtagccgatgaggacgcgcctgatgggtgttctggctacctgacctgtccattgtggaaggtcttacattctcgctgatttcaggagctattgattatgcgtaactttgatttatccccgctttaccgttctgctattggatttgaccgtttgtttaaccacttagaaaacaaccagagccagagtaatggcggctaccctccgtataacgttgaactggtagacgaaaaccattaccgcattgctatcgctgtggctggttttgctgagagcgaactggaaattaccgcccaggataatctgctggtggtgaaaggtgctcacgccgacgaacaaaaagagcgcacctatctgtaccagggcatcgctgaacgcaactttgaacgcaaattccagttagctgagaacattcatgttcgtggtgctaacctggtaaatggtttgctgtatatcgatctcgaacgcgtgattccggaagcgaaaaaaccgcgccgtatcgaaatcaactaattccctaaggccgcctggcgcggcctgacatctccatgctcgccgtcagggagcatatgcgaatcttcggatttgcaggtacttactcgcttcttagaaggagaaatgactatgcgtaacttcgatttatccccactgatgcgtcaatggatcggttttgacaaactggccaacgcactgcaaaacgccggtgaaagccagagcttcccgccgtacaacattgagaaaagcgacgataaccactaccgcattacccttgcgctggcaggtttccgtcaggaagatttagagattcaactggaaggtacgcgcctgagcgtaaaaggcacgccggagcagccaaaagaagagaaaaaatggctgcatcaagggcttatgaatcagccatttagcctgagctttacgctggctgaaaatatggaagtctctggcgcaaccttcgtaaacggtttactgcatattgatttaattcgtaatgagcctgaacccatcgcagcgcagcgtatcgctatcagcgaacgtcccgcgttaaatagctaactagctattctctttgccccgccattctggtggggctttttttgtcttacttactcaacaatgcgttaaatttcgactgtttaagatatttcggcacgttctttcccgtgataatgtgcgctataaggcaaatctgcttcaccgattcagccataatccgtagcaattaaaatgttatctcaagagaaatggacgatgagtgatatagcattaacggtcagtattctggctttggtggcagtcgtcggtttgtttatcggcaacgtcaaatttcgcggcataggattaggtattggcggcgtgctgtttggtgggatcatcgtcggccattttgtttctcaggcggggatgacattaagtagcgatatgctgcatgttattcaggaatttggcctgatcctgttcgtttatactatcgggattcaggtagggccgggcttctttgcctcattgcgcgtctccggattacgcctcaacctgtttgctgttctgatcgtcatcatcggtggtctggttaccgccatcctgcataaactgtttgatattccactgccggtagtgctggggattttctccggtgcggttaccaatacgccagcgctgggggcagggcagcagattttgcgcgacctgggtacaccaatggaaatggtcgatcagatggggatgagttacgcgatggcgtatccattcggcatttgcgggattttgttcaccatgtggatgttgcgggttattttccgcgtcaatgtcgagacagaagctcagcagcacgagtcttcacgcaccaatggcggcgcgctgatcaagactatcaatattcgcgttgagaaccctaacctgcatgatttagccattaaagatgtaccgattctcaacggcgacaaaattatctgctcgcgtctgaaacgcgaagaaaccctaaaagttccttcgccagataccattatccaactgggcgatttgctgcatctggtgggtcagccagcggatttacataatgcgcaactggtgattggtcaggaggtcgatacttcgctgtccacgaaaggcactgatttgcgcgtcgagcgtgtggtggtcaccaatgaaaacgtgctcggaaaacgtattcgcgacctgcactttaaagaacgctatgacgttgttatctcgcgcctgaaccgtgccggggtcgaactggtcgccagtggcgatatcagcctgcagttcggcgatatcctcaatctggtggggcgtccgtccgcaattgatgccgttgccaatgtgctggggaatgcgcagcaaaaactgcaacaggttcagatgctgccagtgtttattggcatcgggctaggcgtattgttaggttctattcccgtctttgtgccaggattcccggccgcgttgaaactggggctggcgggcggaccgctgattatggcgttgatcctcgggcgtatcggcagtatcggcaagctgtactggtttatgccgccaagcgccaacctcgcgctgcgggagctggggatcgtgctgttcctctcggtcgttggtctgaaatctggtggggattttgtgaataccctggtcaatggcgaagggctaagctggattggttatggtgccctgatcaccgccgttccgctgattactgttggcattctggcgcggatgttagccaaaatgaattacctgaccatgtgcgggatgctggcaggttccatgaccgatcctccggcgctggcgtttgctaataatcttcatccaaccagcggtgcggcggcgctctcttacgccactgtctatccgttggtaatgttcctgcgcattatcaccccccaattactggcggtgctcttctggagtatcggttaactcttttccgggtggagtcgccgtaaatggtactccacctggtattcgctggcatttctgaacatcactgaataattcaaaaactccccgctctcgctatatgacaacgaggtgatccgcagcagtggcgtgtgttccgctaccttcatttgccgcgccagcagtctatcggcgagcactggcgtcaggctttcataattaccgccaatcaaaatcccgcactcttgttcaatatattcaaacttcgacccttccagatgttgcagcgaaagattacggaacagttttaccggcatatagctgtcttccagcatcagcggtttcccttccacaaaacgaacgcgacgggagaagtagatctgctcgttgatttgaatccgtaactggctggcaatggccggaggcgcaggcatgatttcaaaaatcagcacctggctggtgaccgtttttccctgccgttttaacacctccaccagcccggtcagactggcggtttgatgcagtacatctttgcgcaccaggtaagtgccactaccgtggcggcggaccaccagcccccacgctaccagcaggtcaatggctttacggatggtcatccgcgataccgcaaactcttccgccagctttttttcaccgggaagaaggctgtttagcgtgaaatctgcggagttaagtcgaattcttaaccgctccgcaatgcttttgtagatcatctctagatctcttttttgcctgcaagcccgggtaatgcgcacacaagttctgcttaatcgattgaaaaaacatcttttttttaaagatgtgttcgatgctgtgtacctgtgctcacagaggtctactttttcgcgaaaacgtagatctctaccgcccaacgaaaagcatgaaagcgatcacgaatcccattgggtcgtcatgttctgccgatcgcatcttcctatcctcgctccaggcctgccgcataaccaatcaggcttcctacttacagaattgagaaaagaggatgtggaaatgctcagtcaaattcaacgctttggcggcgcgatgttcacgccagtgctgctgtttcccttcgccgggattgtggtgggtcttgccatcttgctgcaaaacccgatgtttgtcggggaatcactgaccgatccgaacagtttattcgcgcaaatcgtacacattattgaagagggcggttggacggtattccgtaatatgccgctgatttttgctgtcggtttacccattggccttgctaagcaagcgcaggggcgtgcttgtctggcggtgatggtgagtttcctgacctggaactatttcatcaacgcgatgggaatgacctggggaagctacttcggcgtcgatttcactcaggacgcggtggcaggtagcggtctgacaatgatggccgggattaaaaccctcgataccagcattatcggcgcaattatcatttccggcattgtgacggcgctgcataaccgtctgttcgataaaaaactgccggtttttctcggcattttccaggggacgtcttatgtggtgattatcgccttcctggtgatgatcccctgtgcctggctgacgttgctcggctggccaaaagtacaaatggggattgaatctctgcaagcgttcctgcgttcggcgggtgcacttggggtctgggtttacaccttcctcgaacgtattctgatcccaaccggtttacaccacttcatctacggacagtttatctttggtccggcagctgttgaaggcggcattcagatgtactgggcgcagcatctgcaagagttcagtttgagcgccgagccgctgaaatcgttgttcccggaaggcggttttgccctgcacggtaactcaaaaatctttggtgccgtgggcatttctttagcgatgtacttcactgccgcaccggaaaatcgggtaaaagtggcgggcttgctgattcccgcaaccttaaccgccatgctggtgggaattaccgaaccgctggaatttaccttcctgttcatttcaccgttgctgtttgcggtacacgccgtgctggcggcctcaatgtcgaccgtaatgtatctctttggtgtggtgggcaacatgggcggaggtctgattgactaggttttaccgcaaaactggatcccgatgttcagcaaccacgcggatatgatgctgacccaaatcgccattgggttgtgctttaccctgctgtacttcgtggttttccgcacactgattctgcagttcaacatgtgcacgccgggacgtgaagatgcggaagtgaaactctactcaaaagccgaatacaaagcctcgcgaggccaaaccaccgcggcagagccaaaaaaagagctggatcaggctgccggtatcctgcaagccctgggcggggtcggcaatatctccagcattaacaattgcgcgacgcgtttacgtattgcactgcatgacatgtcacaaacgctggatgacgaagtctttaaaaagctgggagcgcacggcgtcttccgtagtggcgatgccattcaggtgatcattggtctgcatgtatctcagctgcgtgaacagctcgatagcttaattaattctcatcaatcagcagaaaatgttgccattacggaggcagtataatgaccaaattctcagtggttgtcgcaggcggtggaagcacctttacgccaggcatcgtgttgatgctcctggcgaatcaggaccgtttcccgcttcgtgcactgaaattttatgataacgatggtgcgcggcaggaagtgattgccgaagcctgtaaagtcatccttaaagaaaaagcgccggacattgcgtttagttacaccaccgatcctgaagtggcattcagcgacgttgattttgtcatggcgcacatccgcgtcggcaaatacccgatgcgcgaactggatgaaaaaatcccgctgcgccacggcgttgttggtcaggaaacttgcggacccggcggaatagcgtacggcatgcgttccattggcggcgtcctggaactggtggattatatggaaaaatattcaccaaatgcctggatgctcaactactccaacccggcagccattgtcgcagaagccacgcgtcgtctgcgcccgaatgcgaaaatcctcaacatctgtgacatgccaatcggtattgaaagccggatggcgcaaattgttgggctgcaagatcgcaaacagatgcgcgtgcgctactacggcctgaaccactggtggtcggcgatatcccgcagtttcagaaagggttaatgagtcagcaagtggcggtggaaaaactggtcgtggacgcctgggaacagcgttcatatcagcacctgtggcaggcgattacgttgtcgaaaacggtaccgagcgcctcggtcgccaaagctattctggatgagttgctggaggccaacaaagcgtactggccagagttacgttaattgtgtggactggcatccgttgggtgctggtccgtattctttagcacggctgacggcgcataaccaaatttatgtttaaaggctttgctgaaatgaaaggagtcgaagaagttgagcgtatcagcgacttcgccaaccgagtttccttgttgctttaatagcgatagcgccagatccagacgcgcatcgaggtaatattctttcggcgtcttgccggtatagcgtaaaaacagacgacgcaaccaggcttcgctacaggggatcgtggcagccatatcagctacgctccagcgttgttgcagactggcatgtaaagtggcaattaatttttcaatttgccgccgttgtggatcttttttaccatctgcgtacataagacaaatccactgataaataattttcgtcagaaaagcgactgccagattattttttattgcttctggtgaagttattaactcagcaacttcggtgagttcctgattataaatttcgccattataaataacgctttgctgaccaacgggaatatccatcatactggtgggggtaaattccatccagtactgttcccagactaaaccttcacagtgataagagtgaatatccattggctttaagaatataatacagttgccatgcagtgttatttgttcgccattctttaaaagaattttcccacatccttgtacggtatacaccgcaacccatgagttggcgataagcggtttcttcttgtcccgcggccagatcacccggtaatgctcgtcggcgtaggtatgccagagcgagatcagagaaattccgctggagatcacattttcgttaatcaataagggaatattgtacggagtttcgttttttacatctgaactttgcaattttccattcattttaatatccctccggcgaattatgctcacaacctgaacttaacagaaaacaatccgttcagggatacgacgtttgtattttaagaatctgactgcctgacccgacgcattttacctctccctatattcatgcgtccgggacataaacataaataagggctatgagatgaattcgttacaaatcttgagttttgtcggttttacgctgctggtggcggtgatcacctggtggaaggtccgcaaaacagataccggatcgcaacaaggctattttcttgccggacgttcactaaaagcgccggttattgccgcttcgttaatgctaaccaacctttccacggaacaactggtcggcctttccgggcaggcctacaaaagcggcatgtcggtgatgggctgggaagtgacttcagcggtgacgctgatcttcctcgcgctaatctttttaccgcgctatctgaagcgcggcattgccaccatccccgattttctggaggaacgttatgataaaacgacgcgtattatcatcgacttctgcttcctaattgccaccggcgtctgctttctgccgattgttctctactccggcgcgttggcgctcaacagcctgtttcacgtcggggaatcgctacagatttctcacggtgcggctatctggctactggtaattttgcttggtctggcgggaattttgtatgcggtgatcggcggactgcgcgcaatggcagtggcggactccatcaacggtattgggctggttatcggcgggttgatggtgccggtatttggcctaatcgcgatgggcaagggcagctttatgcagggcattgagcaactcaccaccgttcacgccgagaaattaaactcaatcggtggcccgaccgatcccttgccgattggcgcggcatttaccggtttgattctggtgaacaccttttactggtgtacaaatcagggcatcgtgcaacgcacgctggcgtcaaaaagcctggcggaagggcaaaagggggcgctgttaacggcggtgctgaaaatgctcgacccgctggtactggtgctgccagggttgattgcgtttcatctgtatcaggatttaccgaaagccgacatggcctacccgacgctggtcaataacgttctgccagtgccaatggtgggtttcttcggcgcggtgttatttggtgcggtgatcagtaccttcaacggctttctgaatagcgccagtacgttattcagtatgggtatttaccgtcgcatcattaaccagaatgccgagccgcagcagctggtcaccgtcgggcgcaaatttggtttctttatcgctatcgtttcggtgctggtcgcgccgtggatcgccaacgcgccgcaggggctgtatagctggatgaaacagctcaacggcatttacaacgtgccgctggttaccatcatcattatgggctttttcttcccgcgcatcccggcgctggcggcaaaagtagcgatggggattggcataatcagctacatcaccatcaactatctggtgaagttcgacttccatttcctctatgtgctggcctgtacgttctgcatcaacgtggtcgtgatgctggtgatcggttttatcaaaccgcgcgccacgccgttcaccttcaaagatgcgtttgcggtggacatgaaaccgtggaaaaacgtcaagatcgcgtcaattggcatcctgttcgcgatgattggcgtctatgccgggctggctgaattcggcggctacggtacgcgctggttagcgatgatcagttatttcattgccgccgtagtgattgtctacctgatttttgacagctggcggcatcgtcacgacccagccgtaacctttactcccgacgggaaggatagcctatgaaacgccccaattttctgttcgtcatgaccgatacccaggccaccaatatggtcggttgctatagcggtaaaccgctgaatacgcaaaatattgatagtctggcggcggaaggtattcgctttaattccgcctacacctgttcaccggtttgtacgcctgcacgggccggactatttaccggtatctacgctaaccagtccggcccgtggaccaacaacgtcgcgccaggcaaaaacatctccactatggggcgctactttaaggatgccggctatcacacctgttacatcggcaaatggcatctcgacggtcatgactatttcggcactggcgagtgtccgccggagtgggacgctgattactggttcgatggggcgaactatcttagcgaactgacggaaaaagagattagcctgtggcgcaatggcctaaacagcgtcgaagatttacaggcgaaccatatcgacgaaaccttcacctgggcgcatcgtatcagcaatcgggcggtggattttctgcaacagcctgcgcgcgcagacgagcctttcctgatggtggtttcgtatgatgagccgcatcacccgttcacctgtccggtggagtatttagagaaatacgctgatttttactacgagctgggcgagaaagcacaggatgacctggctaacaaaccggaacatcaccgcttatgggcgcaggcgatgccatcgccagtcggtgatgacgggctttatcaccatccgctctattttgcctgtaatgactttgttgatgaccaaatcggacgggtcatcaatgccttaacgccagagcaacgtgaaaatacgtgggttatttatacctccgatcacggcgaaatgatgggcgcacataagctgatcagtaaaggggcggcgatgtatgacgacatcacccgcattccgctgatcatccgttcgccgcaaggggagcggcgacaggtcgatacgccagtcagtcatatcgatttactgccgacaatgatggcgctggcagatattgaaaaaccagagattctgccgggggaaaatatccttgccgtgaaagagccacgcggcgtgatggtggaatttaaccgctacgagattgagcatgacagctttggcggttttattccggtgcgttgctgggtgacggatgactttaaactggtactcaacctcttcaccagtgatgaactttacgatcgccgtaatgacccaaatgaaatgcataacctgatcgatgatatccgttttgcagacgttcgcagcaaaatgcatgacgccttattggattacatggacaaaattcgcgatccgttccgcagttaccaatggagtctgcgtccgtggcgtaaagatgcacggccgcgctggatgggggcgtttcgtccacgtccacaagatggctattcgccagttgtacgcgactatgacaccggcctaccgacacaaggggtgaaggtggaggagaaaaaacagaagttctgacgataatgcccgctgatgatcacccggcgggcattattcaggctgcttaaaccagtgaaccgccggtcaggaaggaaaagataaggaatatcagcaaaatgctgcacacgatgccgataccaaaaagcaaggtatggaaagccagcgtcccgccgccaaaaaccagcgcgccgcgaatgccccagcgattttccttacgcataccgccaataaatgcgcaaagtagcgcagcaatggccagtgcgataccgctttgattgaggattttatcgacatctacgtcctcttttttctccacggtggtaattttttcgccttttattccggcgagaagacctcttttaatttcagccgttttgtccgccacgatgctttcaaacgttggcggtggtgcggagaaagggccgaatgaaaagtggataatccccatcattaaagcgatggcaccgaacagcatgcccaatgaactgattttattttgagctatgatacccatctgacctccttgtagcggatggcaaaagcatatcaggaaacgggcggacgaaattcttaaaaaaaccgctaaaggtagagcgttagtgaaattgcaaaggagcaacaatgaaaatttcccgcctcggagaagcgcctgattaccgcttctcgctggctaatgagcgtacttttctggcgtggatccgtactgcactaggatttctggcggcgggggttgggcttgatcaacttgcgccagatttcgccacgcccgtcattcgcgaactgctggcgttgttgttgtgtctgttttccggcgggttagcgatgtatggctacttgcgctggttacgcaatgaaaaagcgatgcgtctgaaagaggacctgccctacaccaacagcttattaatcattagcttaatattgatggtcgtggcggtgatcgttatgggactggtgttgtatgccggatagccgcaaagccagacgcattgccgacccaggactgcagccggagcgcacatcactggcgtggtttcgtaccatgctgggctacggcgcgttgatggcgttggctatcaaacacaactggcaccaggcgggcatgttattctggatttcgattggcattctcgccatcgtggcgctgatcctctggcactacacccgtaatcgcaatttaatggatgtcacgaatagcgatttttcccaatttcacgtagtccgtgacaaatttttgatctccctcgcggtgttatctctcgcaatactgtttgctgtaacgcatatacatcaacttatcgtatttattgagagagtcgcatgacaggaagtcaggtcattgatgctgaagaggacaggcataaactggttgtagagtacaaggatgctctgcaacctgccgatttttatcacaatttcaaacagcggggcatccgctccgtacagctcattccctatcttgaatttgatgaccggggcgatctgacggccgcttcggtgacagcagagctgtgggggaaatttttaattgccctgttcgagtgttgggtgcgggcagatatcagtcgtatctcgattgagctttttgacgccaccttacaaaaatggtgtggcagcgaaaacccgcaaccgcgctgtgactgccaggcgtgcgactggcatcgcctgtgcccgcacgctcggcaggagacgccagacagcgtgctttgtgcgggctatcaggcgttttattcttactccgcaccgcatatgcgggtgatgcgtgatctgataaagcagcatcgttctcccatggagctgatgacgatgctgcggtgacgtgcgcttaaacgggctgcccctgatgcgacatccgcgtcgccagcggcagccagcacagcacgatcaacaatcccattaaggtcatcaacaaccccaggctgccctgaccggtttgcggcaacatcgcagagagcgacgccagcacgccggaaccaatgttttgcagaccgccgaccagcgcgccagccgtgcccgccaggaaggggaacggctccatcgcgccgctggtcgccagcggaaacagcatcccggcaccgaaaaagaacagcgcggcgggaacgagcagcgtccagacattcatcacgccaaaccagtcggggatccacatcagcaagccagccagcaggcagcagataaccgactgccacattaacgtggagaagcgtttattgggacgtccggcaaaccatgcgccaaaaaacgctgccggaatcggcagaataaacaaaatactgaccgtcatactgctcagccctaacaccgcgcccatcagcacgccggagcaggcttcaaaggcggcaatcccggccagaccgccaatcagcatcagcaaataacagttaaaaccgctgttaccgaaaagcgttttataactggtaagcaggcgcgtgcgcggtgcatcgaccggacgcgtttccggcatccagcgggccatactgaaggtcacaccagcacaaagaaccaacaaaaagagataacaggcgcgccagttccacatcgtatccagcagaccgccgattagcggtgcgagcaacggactgacgagaatccccatgtttaacaggctgttagcatggcgcaactgtgtccgttcatataaatctcgcggtaaagtacgcgccattacgccgccaacgccggtgcccatcccctgcatcgcgctggcggcaatcaacaccgtcaaactggaggtcgtgaccgcgaccagcgttgccagcataaaaatggacattccgacgaggatcaccggtcggcggcccacgcggtcggaaatcgggccataaaacagctgtgagacaccgtaagtcagcagataagcgcccattacgctctgcaccgccccttcacggacgttgagatcgcgcgccatatcggcaatagctggaatataaatggtttgcgccatctgaccgacggccacgagtaataccaacatcaataacaaattgacgtttctttgccttttcattatcacggatgcttttataaaaataattagaataagtcactacgcattcccataaatgcgggagaggaatctatcacattgatgaatgttagccagatatacgccaggaatggggaattgtttagcggcagaatatgtaaacaaaagcggcaataaatgttgccgggagagatggtagggcggataagatgcgtcagcatcgcatccgacaccaacccgcacgctaaatataaaaggggagcggtttcccgctcccctttggtgcgacttgaatctgaattacttcaggtatttcagaacagcatcaagcagttgcagtgctgcaacaatgagtttgaggataagaatggcgatatccaccaggttcatacgcgtctcctgtggttcaggagcactgccagctgacgtacctttccgctgcctgttgccagctgttgtgcacgcggtatctcaaggagaaacgttgtgcttgttgacataacacagtgtgctcacgcggggttaaggcgctgacggcaccacccgtttcagccaggacttagtgcgccgggtaacgatgcggcccccgcataacacattgcgtacagtgatattatagaagtttactgtataaataaacagtaatatttggacaaaacgcaaactgtgatcgatactcaactatgcactaaatacgtcaaaattcgtgccgaaattgcgcgttctgcgcggaacacgtatactttcagtgttgacataatacagtgtgctttgcggttaccagccgcaggcgactgacgaaacctcgctccggcggggttttttgttatctgcaattcagtacaaaacgtgatcaacccctcaattttcccttgctgaaaaattttccattgtctcccctgtaaagctgtgcttgtataaatattgttaaacacaaaaccaacaaggtccccaatgactacttccatgctcaacgcaaaactactaccaactgcgccatccgccgcagtggtcgtcgtgcgtgtggtggtggtcgtcggcaatgcgccgtagggactggaacaacacacgattccaaaaccccgccggcgcaaaccgggcggggtttttcgtttaagcacctcccggaaagtcggcccagaagaaaaggactggagcatggcaagttcgggcacaacatcgacgcgtaagcgctttaccggcgcagaatttatcgttcatttcctggaacagcagggcattaagattgtgacaggcattccgggcggttctatcctgcctgtttacgatgccttaagccaaagcacgcaaatccgccatattctggcccgtcatgaacagggcgcgggctttatcgctcagggaatggcgcgcaccgacggtaaaccggcggtctgtatggcctgtagcggaccgggtgcgactaacctggtgaccgccattgccgatgcgcggctggactccatcccgctgatttgcatcactggtcaggttcccgcctcgatgatcggcaccgacgccttccaggaagtggacacctacggcatctctatccccatcaccaaacacaactatctggtcagacatatcgaagaactcccgcaggtcatgagcgatgccttccgcattgcgcaatcaggccgcccaggcccggtgtggatagacattcctaaggatgtgcaaacggcagtttttgagattgaaacacagcccgctatggcagaaaaagccgccgcccccgcctttagcgaagaaagcattcgtgacgcagcggcgatgattaacgctgccaaacgcccggtgctttatctgggcggcggtgtgatcaatgcgcccgcacgggtgcgtgaactggcggagaaagcgcaactgcctaccaccatgactttaatggcgctgggcatgttgccaaaagcgcatccgttgtcgctgggtatgctggggatgcacggcgtgcgcagcaccaactatattttgcaggaggcggatttgttgatagtgctcggtgcgcgttttgatgaccgggcgattggcaaaaccgagcagttctgtccgaatgccaaaatcattcatgtcgatatcgaccgtgcagagctgggtaaaatcaagcagccgcacgtggcgattcaggcggatgttgatgacgtgctggcgcagttgatcccgctggtggaagcgcaaccgcgtgcagagtggcaccagttggtagcggatttgcagcgtgagtttccgtgtccaatcccgaaagcgtgcgatccgttaagccattacggcctgatcaacgccgttgccgcctgtgtcgatgacaatgcaattatcaccaccgacgttggtcagcatcagatgtggaccgcgcaagcttatccgctcaatcgcccacgccagtggctgacctccggtgggctgggcacgatgggttttggcctgcctgcggcgattggcgctgcgctggcgaacccggatcgcaaagtgttgtgtttctccggcgacggcagcctgatgatgaatattcaggagatggcgaccgccagtgaaaatcagctggatgtcaaaatcattctgatgaacaacgaagcgctggggctggtgcatcagcaacagagtctgttctacgagcaaggcgtttttgccgccacctatccgggcaaaatcaactttatgcagattgccgccggattcggcctcgaaacctgtgatttgaataacgaagccgatccgcaggcttcattgcaggaaatcatcaatcgccctggcccggcgctgatccatgtgcgcattgatgccgaagaaaaagtttacccgatggtgccgccaggtgcggcgaatactgaaatggtgggggaataagccatgcaaaacacaactcatgacaacgtaattctggagctcaccgttcgcaaccatccgggcgtaatgacccacgtttgtggcctttttgcccgccgcgcttttaacgttgaaggcattctttgtctgccgattcaggacagcgacaaaagccatatctggctactggtcaatgacgaccagcgtctggagcagatgataagccaaatcgataagctggaagatgtcgtgaaagtgcagcgtaatcagtccgatccgacgatgtttaacaagatcgcggtgttttttcagtaaccgctcaaggcttgaacaacatcgcgcttatcgttaaggtaagcgcgtattttttttacccgccaggacaagaccatgatcaccgttgcccttatagacgatcacctcatcgtccgctccggctttgcgcagctgctggggctggaacctgatttgcaggtagttgccgagtttggttcggggcgcgaggcgctggcggggctgccggggcgcggtgtgcaggtgtgtatttgcgatatctccatgcccgatatctccggtctggagctgctaagccagctgccgaaaggtatggcgacgattatgctctccgttcacgacagtcctgcgctggttgagcaggcgcttaacgcgggggcacgcggctttctttccaaacgctgtagcccggatgaactcattgctgcggtgcatacggttgccacgggcggctgttatctgacgccggatattgccattaaactggcatccggtcgtcaggacccgctaaccaaacgtgaacgccaggtggcggaaaaactggcgcaaggaatggcggtgaaagagattgccgccgaactgggcttgtcaccgaaaacggtacacgtccatcgcgccaatctgatggaaaaactgggcgtcagtaacgacgtagagctggcgcgccgcatgtttgatggctggtgatgaagacgttgttctcccgcttaattaccgttattgcctgcttttttatcttctctgccgcatggttttgcctgtggagtatcagcctgcatctggttgagcgccctgatatggcggtgctgttatttccgtttggtctgcgtctggggctaatgctgcaatgcccgcgcggatactggcccgtattgctgggcgcggagtggctgctgatttactggctaacgcaggcggtcggtttaacccattttccgttattgatgatcggtagtttactgacgttactgcccgtagcgctgatctcgcgctatcgccatcagcgtgactggcgcaccttgctgttacagggggcggcgttaacggcggcggcgttgttgcagtcgctgccctggctttggcacggcaaagagtcgtggaatgcgctgttgctgactttaactggcggcctgacgctggccccgatatgtctggtgttctggcactatctcgccaataacacctggctgccgctcggtccgtcactggtttctcagccaatcaactggcgcgggcgacatctggtctggtacttgctgctgtttgttatcagtctctggctccagttgggattgccggacgaactgtcgcgctttacgccattctgtctggcgctgccgattatcgcgctggcctggcactatggttggcaaggggcgctgattgcgacgttgatgaacgccatcgcgctgatcgccagtcaaacctggcgcgatcatccggtggatttattgctctcgctgctggtgcaaagtctgacagggttgttgcttggcgctggcatccagcggttgcgtgaacttaaccagtcgctgcaaaaggaactggcgcgcaatcagcatctggctgaacggttgctggaaaccgaagagagcgtgcgccgtgatgtggcgcgtgagctgcatgatgatatcggtcagaccatcactgctattcgtactcaggcgggcattgttcagcggctggcggcagataacgccagcgtgaagcagagcgggcagctcatcgaacaactatcgctgggcgtttacgacgcggtgcgccgtttgttgggtcggttacgtccgcgccagttggatgatctcaccctggagcaggccatccgctcactgatgcgggaaatggagctggaagggcgcggtattgtcagccatctcgaatggcgaatcgatgaatcagcgttaagcgaaaaccagcgcgtgacgctgtttcgtgtctgccaggaagggctgaacaacattgtgaaacatgctgatgccagcgcggtcaccctgcaaggctggcagcaggatgaacggttgatgctggttattgaagacgatggcagcggtttgccgccgggttccgggcaacaaggttttggcctcaccggaatgcgcgagcgcgtaacggcgctgggtggcacattacacatttcctgtctgcacggcacgcgtgtcagcgtttctctacctcaacgctatgtctaaggtttgatgatgttgccgtttctgaaagcgcctgccgatgcgccattaatgactgataaatatgaaattgatgcccgctatcgctactggcgtcggcatattctgctgaccatctggctgggttacgcgctgttttacttcacgcggaaaagttttaacgccgccgtaccagaaatccttgctaacggcgtgctcagccgtagcgatatcggcctgttagcgaccctgttttacattacctatggcgtgtcgaagtttgtctccggcattgtcagcgatcgctcaaatgcccgttattttatggggatagggcttatcgccacgggcattatcaacattctgtttggcttctcgacgtcgctatgggcgtttgccgtgctctgggtgctgaacgcctttttccagggctggggttcaccggtgtgtgcgcgtctgttaacggcctggtattcacgtaccgagcgcggcggttggtgggcattatggaacacggcgcataacgtcggcggcgcactcattcccattgtgatggcagcggctgcgctgcattacggctggcgtgccgggatgatgattgctggttgtatggcgatagtcgtggggatttttctctgctggcggctacgcgatcgcccgcaggcgttaggtttaccggcggtcggtgaatggcgacacgacgcgctggaaattgctcaacaacaagaaggggcagggttgacgcgtaaagagatcctcaccaaatatgtgttgctgaatccgtatatctggctgctttcgttttgctatgtgctggtctatgtggtccgggcggcgatcaacgactggggcaatttgtatatgtccgagacactgggcgtcgatctggtcacggcgaatacggcagtgacgatgtttgaactgggcggatttatcggtgcgctggtagccggttggggctcggacaaattgtttaacggcaaccgagggccgatgaatttgattttcgccgccggaattttgctttcagtcggctccctgtggctgatgccatttgccagctacgtgatgcaggcaacctgcttcttcaccattggtttttttgtctttggcccacagatgttaatcggtatggcggcggcagagtgttcccacaaagaggcggcaggggcggcgacggggtttgtcggcttgtttgcttatctgggggcgtcgcttgctggttggccgctggcgaaagtactcgatacctggcactggagcggattttttgtggttatctctatcgccgccgggatttccgcactgctgttactgccctttttgaacgcccagacaccgcgcgaagcgtgatgcatctcaccttttcacttcatatccggcaaaactaagaaattttccaggttttgcctggacgctatctcaggcctgatttgctgctgatttttacaatgcatgcctcacgcaggtattcatttcaggagtaacccatgctggctttcttaaaccaggttcgcaagccgaccctggaccttccgctcgaagtgcggcgcaaaatgtggttcaaaccgttcatgcaatcctacctggtggtctttatcggctacctgacgatgtacctgattcgcaagaactttaacatcgcgcagaacgatatgatttcgacctacgggttgagcatgacgcagctggggatgatcggcctgggtttctccatcacttatggcgtgggtaaaacgctggtttcctactacgccgacggcaaaaacaccaaacaattcctgccgttcatgctgatcctctctgctatttgtatgctgggcttcagtgccagtatgggcagcggctcggttagcctgttcctgatgattgccttctacgccttaagcggctttttccagagtaccggcggttcgtgcagttactccaccatcaccaaatggacgccgcgtcgtaaacgcgggacattcctcggtttctggaatatttctcacaaccttggcggtgcaggcgcagcaggtgtggcgctgttcggggcaaattacctgttcgatggccatgtcatcggcatgtttatcttcccgtcgattatcgcgctgattgtcggttttatcggcctgcgttacggcagcgactccccggaatcttatggcctcggcaaagctgaagaactgttcggcgaggagatcagcgaagaggacaaagagacagaatctaccgatatgaccaagtggcagatctttgttgagtatgtgctgaaaaacaaagtgatctggctgctgtgcttcgccaacattttcctctatgtggtacgtattggtatcgaccagtggtcaaccgtatacgcgttccaggaactgaaactctctaaagcggtggcgattcagggctttacgctgtttgaagctggtgcgctggtcggtacgctgctgtggggctggctctctgacctggcgaacggtcgccgtggcctggtggcctgcatcgcgctggcgctgattatcgccacgctcggtgtgtatcaacatgccagtaacgaatatatctatctggcttctctctttgcgttgggtttcctggtctttggcccgcaattgttgattggtgtggctgctgttggctttgtacctaaaaaagcgattggcgctgccgatggtattaaaggcacctttgcttacctgattggtgacagctttgccaagttaggtctgggaatgattgccgatgggacgccggtattcggccttaccggctgggcaggcaccttcgccgcgctggatatcgccgcgattggttgtatctgcctgatggcgatagtggcggtaatggaagaacgcaaaatccgccgcgagaaaaaaattcagcagttgacagtggcataaacgtaactggtgacttttgcccggcatgacgccgggctttttttattattccgtgacttccagcgtagtgaaggcaaacttctcgccatcaaatagcccctgactggttagttttagcgcggggatcactggcagagaaagaaacgccatctgaataaacggctcatcgggtaacggaccgcattcacgggcggcggctttcaaggcgtcaatttgttccgccagcgactgcgccgtgtcggtgctcatcagcccggcaatgggtaacggcagatgactttgtacctggccgttacgtaccacgcacagcccgccgccatcctgaatcacctgattgaccgccagcgccatctcttcggcactgcgaccgatcaccacaatattatggctgtcatggctgaccgtcgcagccagcgcaccttcattcagtccaaagccgccaagcaaaccacaagccggagccagccgttgcccgtaacgctcaagtacggcaataaagctcacatcatcgcgatcaaaaccattttcgctgtagacgctggagtgggagtgcgtaatcaattcgttatggatgacgtcaatgacccgatagcgttttccgggcgtaaattgcagggcaaagtcgctggcggaaactggctggcgggcaatggtgttgccatatggcggagcggattgtgccagtctcgccgactcttccgcctgtaaggtttgcgcatcaatcggctcgcctttcaccagtacctgctgcaccgtgaccttacgcgcatcgctcaacaggacgatatcggcctgcttgccgggtgccagtaagccgaggtgattcagaccaaagtggcgcgccgtcgaccagctggcgacgcgatatgccacatgcagcggcacattgtgttgttcgatcaggcggcgaattaaggcatcgatgtgtccttcatgggcgatctcccacgggttacggtcatcggtacagagcatgcattgcgggctgttaaattcgttgatcaacggtgccagcgcgttgagattgcgggcagcggacccttcgcggatcatcaacgacatgccgagttgtaatttccggcgtccttcttccagctgataactttcgtggcagttttcaatacccgcagtaatataggcgttaagttctttaccacccaaacccgggcagtgaccgtccagcgtcaggtggcgaaatgcatccagtttatcgagcagcgcattctgcccgctaattacgccagggtagtccatcatttctgcaaggccggtaacctgcggatggtcccgccaggcgagcatctgttcaagggtaaaactggcaccgttaacatcgcagccttccagggcgggtacgcaagagctgacctgtaagtactggttttgccttgcctgttcggcacagcgggcaaaccaggcgaatccggcttcgcccatcacgttgacgatttcatgagggtcgcaaataacggtcgtcaggccgcgcggcagggtagcggtttcaaaagtgaccggcgtcatcatgctggattcaatatgcaggtgagcatcaataaaccctggcaccgccgttgcgccgcgagcatcaatccgctgcaaagccggagcatcagtgtattctgcgccaacaccggcaatgtaacgtcctttaatcacaattgggccggaaatttctccgccattgatcaggtcgagaatagagacattatcaataatataatcggcaacagcgtcgccacgggaaacggctaacaattcctggtattcagcccggctaatgtgatgaaatttatggttaatagaattattcatatttttctcattttgattttatcaatttgattattatttatcataaagaaacgtcgcgagattattaaagaatatccattaatgtgcaattgaaatgtgataattatcactgaaccgttgttgtcatttgttttacaaaagcaagggattaaatctcctccaatggacaaaaaaatgaataatgacaataccgattacgtgagtaatgaatcagggacgctttcgcgattatttaaactacctcagcatgggaccaccgtccgcacagaattgattgcggggatgaccacttttttaaccatggtgtacatcgtttttgtgaacccgcaaatcctcggcgcggcacaaatggacccgaaagtggtgtttgttaccacctgtttgattgccggtatcggcagtattgcgatggggatatttgctaacttacccgtggcgctggctccggcaatggggctgaacgccttctttgccttcgtggtcgtgggggcgatgggcatctcctggcagaccgggatgggcgcaatattctggggcgcagttggactatttttgctcacgctgtttcgtatccggtactggatgatctccaacattcccttaagtttacgtattggtatcaccagcggaattggattatttatcgccttaatgggattaaaaaatactggcgttattgtcgccaataaagacacgctggtgatgattggcgatttaagttctcacggcgtgttgttaggtattttagggttttttattataaccgtgttgtcatcacgtcattttcatgccgcggtgctggtttctattgtggtgacgtcttgctgtggattatttttcggtgatgttcattttagcggcgtctattccattccgcctgatattagcggcgtcattggtgaagtagatttgagcggcgcgttaacacttgaactcgccggtatcattttctcctttatgctgatcaacctatttgattcatcaggaacattaattggtgtaactgataaagcgggcttaatagatggtaacggtaaattccccaatatgaataaggcgctgtatgttgatagcgtcagttcggtggcgggtgcgtttatcggcacctcgtctgttactgcctatattgaaagtacttctggtgtggcagtcggtggccgcacggggctgactgcggttgtggttggcgttatgttcctgttggttatgttcttctcaccgctggtggcgatagttcctccttacgcaaccgccggagcgttaatctttgttggcgtgctgatgacttcgagcctggcgcgcgttaactgggatgattttaccgaatcggtgcctgcgtttattaccacggtgatgatgccctttactttctcgatcaccgaagggattgcactcggctttatgtcgtactgcatcatgaaagtatgcaccgggcgctggcgcgatctgaacctgtgtgtggtggtggtcgcagctctgtttgcactgaagattattctggtggattagtaactggcgagggtttccagatatcatgagttctgattacgcaggagaactcatgatctggataatgctcgccacgctggcggtagtgtttgtggttggttttcgggtgctgacatccggggccagaaaagcgattcgccgtctcagcgatcggctgaacatcgatgtcgtacccgtggagtcgatggtcgatcaaatgggaaagtcagctggtgacgaatttttacgttatttgcatcgtccggatgagtcgcacctgcaaaacgccgcgcaggtgttgctcatctggcaaattgtcattgtcgatggtagcgaacagaacctgctgcaatggcatcggattttacaaaaagctcgcctcgccgcgccgattaccgacgctcaggtcaggctggcgctaggttttctgcgcgaaaccgaacctgaaatgcaggatattaatgcttttcagatgcgctataacgcgttctttcagcctgccgagggcgttcactggttgcattgaaaccgtttcgtcttatcagcctacagaccgcgcctgacctgtcgggtggataagacgttcacgccgcatccggtaatctttgccctgttccgtttcgatcttaactccagctcaagcaacaccgtaaaagttgcaaaaacgttaaatgcgtcacacatttcaatgttaaagtggtcggcttttcccctgaaacatgccacgggtaacaccatgagtgaatttattgccgaaaaccgcggcgcggatgccatcacccgaccgaactggtcagccgttttctcggtggcgttttgtgtcgcctgtctgattatcgttgagtttttgcccgtcagtttgttgacgccaatggcccaggatttaggcatttcggaaggggttgccgggcaatcggtgaccgtgaccgcctttgtggcaatgtttgccagtttgtttattacccagacaattcaggctactgaccgccgctacgttgttattttgtttgccgttttgctgacgctctcctgcttgctggtttcctttgctaactcattcagtttgcttttaatcggtcgtgcctgtctggggctggcgctgggcgggttctgggcgatgtcggcgtcgctgaccatgcgtctggtgccgccgcgtacggtgccgaaggcgctgtcggtgatcttcggcgcggtttctattgcgctggtgattgccgcgccgttgggcagttttttaggcgagcttatcggttggcgcaatgtctttaatgcggcggcggtgatgggcgtgctgtgtattttctggattatcaaatcattgccttcactgccaggcgaaccctcgcatcagaaacaaaatactttccgcttattacaacgtccgggtgtgatggcagggatgatcgccatcttcatgtctttcgccgggcagtttgctttcttcacgtatattcgcccggtgtatatgaacctggcgggattcggcgtggatggcttaacgctggtgctgttgagttttggtatcgccagctttattggtacgtcgctttcgtcgttcattcttaaacgttcggtaaaactggccttagcaggcgcgccgttaatactggctgtgagtgcgttggtactgacgttgtggggaagcgataaaatcgttgctaccggcgtggcgattatctgggggctaacttttgcattggttcccgtcggctggtcaacgtggatcacccgctcgctggccgatcaggcagaaaaagccgggtctattcaggtggcggttattcagcttgctaatacctgtggcgcggcaatcggcggttatgcgctggataatattggtctgacttcgccgttgatgttgtccggcacattgatgttgctgactgcattgttggttactgcaaaggtgaaaatgaagaaatcctgatatcaggtaaagaagcgttggtcagtagttgttgctgttcttacatatccgggcattctaccttacccaacgcttcccaataattgctctgattattacgttccatcgccacgatggcctcgcgtatatgttgtttattgttttcatctgacaacattaacttttcccacgcttcatctgataatgacgcctgtggcgtgcaaattttacgtaaatcttgtaataccgtggttttctcttttgcggactgcagtgagctaaaaggcgactcggcgtatacgatgcctggcatagcgaaaaaagtgaaaataagcagtagtgtcgttggtttcatggattcaaccttttacaaatgtgtatcgaatgaagcataagtgtagtttgctttcatcgctctcatcatgctgtacgaaacgcgcttgcgtggtcagtaagaagtgccagactttatattccacttttattcctttttattcttatcgatagcgtttcgttttttaaaccgcagcgaccttaccgctatagtcaggtaatcattaataaaaggataaaaaaatgaaactgacaacacatcatctacggacaggggccgcattattgctggccggaattctgctggcaggttgcgaccagagtagcagcgatgcaaaacacattaaagttggcgttataaatggcgcagaacaagatgtcgcggaagtcgctaaaaaggtggcaaaagagaaatatggcctcgatgttgaactggtaggatttagcggttcgttgctaccgaacgatgcgacaaatcatggcgaacttgatgcgaatgtcttccagcatcgaccctttcttgaacaagataatcaggcgcatggttataaactggtagcggtgggaaatacgtttgtcttccctatggcgggttattccaaaaaaatcaaaaccgtggcgcaaataaaagaaggcgcgacagtggcgatccccaacgacccgaccaaccttggtcgcgcacttttactgttgcaaaaagagaagctaattactctgaaagagggaaaagggttattacctaccgcgctggatataaccgataatcctcgtcatttgcagattatggaactcgagggggcgcagctcccgcgcgtactggatgatcccaaagttgatgtagcgattatcagcaccacttacattcagcagaccgggctttctccggtgcacgacagcgtatttattgaagataagaattcgccgtatgtgaatattttggtggcacgggaagataataagaatgcagaaaacgtgaaggaatttctgcaatcttatcaatcacccgaagtcgctaaagcggcagaaaccatttttaacggtggcgcggtgcctggctggtaattctcacttatgccgcgccggacgatttatttttctggcgcggcgacgggaatccattgaaatcaaaatcaccgatgacagaatcagcagcgttcccagccagtccggtaatgtgaacgtgatccccagcaacagcaaagagagtagcgcgctacttaatggttctgcacagctcaaaatgctggcttttggaccgccaattaattgtgctcctttcaggtacagactaaatgtcagggacgtaccaatgaccaccaaataaaaaaacgccagaatcaaactgccgttaacgacaaagtttgttccttgtctggcataaaaaggcaacagaatcagaccgccaatcagcatactccagccgacgactggtaacgtgccatagcgggcaattagcgttgagggataggtggtatagaatgcagcagcaaatgccgaggcaatgccccagaacaacgcggcaggagagatcgataatgacgtcggattaccgtgtgtcaccaataaaaaagtcccgaccagcgatgtcaaaatagcgcagaaaaccagaatgcccgggcgcgatttacgcaccagtgagaaccaggcgacgataatcgtcggtgagaggaattgcagcaccgttgccgtggctgcgttcgatttttcgatggttagcaaaaaagtgagctgtacagttagcgcgccaaccacggaaaaaatcagcaggctaatggcatctttatgattgttaataatagaaaagattttatcgccatgaacaaatgacagcgtcagtagaatcaaaccggcgaatatcaaacgcgtcatagtcaaaaactgcgacgacatctggctttgctccatgatgtattgcgcgcagacccctgaacttccccacaacacggcggcaatcagaacgttcagcatcccctttctggtggaacccatttttccctctgcatactgttttgtcgtttatgtatgcaggcatgatagcaaaaatggcgaggatggctctgtttgcgccacgccgatttttcttagcccagactggtgagctaaatatctttaataaacagcaggcaaatcatcgcaatacccaacatccctatcgccagccagaacaacgcatggtagctccagatttcaaccataattccgtcaacagagccggcgataatccagccgacgcgtgaagtatttgcatataacgttgtcgcagagcctattttttcaggcatcaagtcctgaaaataaagcatgccgataccacagagaataccaaggaagatggcattaagaatttgcaattccagctcaaccgccggagtcgtcgccatgagtacgctggcgtaaaaacacattccactcacgatagcaatgagcattaatagtcgcttgccaatacgtttcatgtaatagcctgcgattaacatcatcggaatttccagaccggcagcgataccaatcatttctccagtcagtttatcggttagatgcagttcatcaataataaatagcggcatatttatcatgtagagattattcgccgcccacatcattgaacagaccacaaaaagtagccgcgtatcccgcttcctgtgggtggagggtaaaatttctacgggttgggtaacgacaggaatatttctttgtattgatggcaaaaacaaccagactatcagtccgcaaacaacaaatgcgatggcagcggtgagatacatcactttaaaactaaatcccattgccagttcataagcgagcggtggcccgataacccaggcaagcgagatctgagcacgtaaaaatgtactgaacatgaccgtctcacggcctgttctgtcggcgtgttcacgggcgagggcgaacatttgcgggtttgcggtggaagcaaaactactcagaagtacgcccgttgagaggagaatgaagtagttgcgattccacgcaaaaagcgtgcaggccagcactccaaataagcaacatagcagaatcagtaatttacggtcgccttgtttatcggagtgccttgccagaaattgactgaccagaattcccataatagcgctaccggtgaagaaaaaacctaccattataggacgggctttcagttcatctgcgaggaatatacttagggtaggagtctgaagagcgcccgcaatacccgtcagaaaggcgacaagtaaaaatgccgcggcagtgagatcaagtatttttgatggagtggtagccgttttttgcattcttctgaatcaccgggcgaaaaaatataactgagttacaaataagtaccagtcgaatgagtattgtattaagaatttttgagtatcgctgatacaaccagaaagcaatgctagcgcaatattatagggccagcaattgagattattagtaaaagcatgttaagaattaattaccgaatttatatattaattatagtaaggcaatgagctatttttgatagtaaaaataaaacaagttgatttgatatattaaatgaacaaattaatcttgatggcagtctgattattggtgaagtttatagtcagtttttttcgccagcggttaaagaaatagaatagtcgtataaaaaagggtgttctggggcgagtaaaacaacatcttcaccttaatggcgatacagttggctgagagtcagcaggggggcaaatcacctgcaaataaacacggcgcatactggcgtgaatatcgcggatgcgttcgaggacagaagaaccgacaggcggattcttcagccgctcatcgtccatcacaaaaccttagaccaggtattcctgaagccgattgaatattgagcagtagaaaatatctggattgacagtattacaaggggttggagaacgtcaggagaggcattttggcggaagatcacaggagtcgaacctgcccgggaccgctggcggccccaactggatttgaagtccagccgcctcaccggagacgacgatcttccgcgcctcgattgctacatggaggcggggcgcattatagctacttccttgagtttctacatcccccagatcagttttttccgcctaatacacgcagcgtattatcacgaaagcattatagttcatataaaacccatattttacaatgatatatgagcggaattaacgctaccacgatcacataaaacaagaatcataaattaataaccagatatcggaatattcgctctcacagggatggtttacaaaatgcgttatcggtctcagcacccctatagcatcaaggaaaagcagatgaagagtgaagtgttgtccgttaaagagaaaattggttatggcatgggagacgccgccagccacattattttcgataacgtaatgttatatatgatgttcttttataccgatatttttggcattcctgccggttttgtcggaaccatgtttttggtcgctcgtgcactggatgcgatttccgatccttgcatggggttgttggccgatcgaacgcgctctcgctggggtaaatttcgtccgtgggtactgtttggcgcactgccattcgggatcgtctgtgtactggcctatagcacgccagatctcagtatgaacggcaaaatgatctatgcagcaattacttacaccctacttaccttactttataccgtcgtcaatatcccttactgcgcattgggtggtgtaatcaccaatgacccgactcagcgtatctcgctgcaatcctggcgttttgtgctggcgaccgcgggaggcatgctttctactgttctgatgatgccactggttaatttaattggcggtgataataaaccactcggtttccagggcggtatcgcggtcctttccgtggtggcattcatgatgctggcattttgtttcttcaccactaaagaacgcgttgaagcaccacctacaacaacgtctatgcgggaagatttacgtgatatctggcaaaacgaccagtggcggattgtcggtttactaaccattttcaatatcctggcggtgtgcgtacgcggtggggcgatgatgtattacgtcacatggattttgggcacgccggaagtgtttgtcgcttttctcaccacttattgcgtgggtaacctgattggttccgcactggcaaaacctctgaccgactggaaatgtaaagtcactatcttctggtggacgaacgccctgctggcagtgattagcctcgcgatgttctttgttcccatgcaggccagcatcactatgtttgtcttcatcttcgtgattggtgtgttgcatcaactggtgacacctatccagtgggtaatgatgtccgataccgtcgactacggcgagtggtgcaatggtaaacgcctgaccgggatcagttttgctggcacgctgtttgtgctcaaactggggttggccttcggcggcgctcttatcggctggatgctggcttatggcggatatgatgcggcagaaaaagcgcagaacagcgccacgattagcatcattattgcgctattcacgattgttccggcgatctgttatttgctgagcgcgattatcgctaaacgctactactcactcacgacgcacaatctgaaaaccgttatggaacagctggctcagggtaaacgccgttgccagcaacaattcacctctcaagaagtgcagaactaaggaacggcaatgaaaattagcgatggaaactggttgattcaacctggcctcaatttgattcacccgcttcaggtgttcgaggttgaacagcaggataatgaaatggtggtctatgctgccccccgtgatgtgcgtgaacgtacctggcagcttgatacgcctttatttacgttgcgctttttctccccacaggaaggtattgtcggtgtgcggattgagcattttcagggggcgctgaataacggtcctcattatccgctcaatattttgcaggacgtgaaggtcacaatcgaaaacacagaacgttatgctgagtttaaaagtggcaacttaagcgcgcgtgtcagcaaaggtgagttctggtcactggattttctgcgcaacggcgaacgtattaccggtagtcaggtgaaaaataatggctacgtgcaggacacgaataatcaacgcaattatatgtttgagcggcttgatcttggcgttggcgaaacagtttacggtctgggagagcgctttactgccctggtgcgcaatggccagacggtagagacctggaaccgggacggcggcacaagtactgaacaggcgtataaaaatatcccgttctacatgactaaccgtggttatggggtactggtcaatcatccccagtgtgtctcttttgaagtgggatcggagaaagtctccaaagtgcagttcagcgttgagagtgaatatctcgaatactttgttatcgacggcccgacgccgaaagcggtacttgatcgttatacccgctttactggtcgtccggcgctgccgcccgcgtggtccttcggcctgtggctaaccacttcatttaccaccaactacgacgaagcgacggtaaacagctttatcgatggtatggcggaacgcaatctgccgctgcatgttttccactttgactgtttctggatgaaagccttccagtggtgcgattttgagtgggacccgctgactttccctgacccggaagggatgatccgccgcctgaaagcgaaaggactgaaaatctgcgtctggattaacccctatatcggtcaaaaatcccccgtctttaaagagttacaagagaaaggctatttactcaaacgcccggacggttcgctatggcagtgggataaatggcagccaggtctggcgatttatgactttaccaatccggatgcctgcaaatggtacgccgacaaactgaaaggtctggtcgcgatgggcgttgattgctttaagaccgactttggcgaacgtatcccaactgatgttcagtggtttgacggttccgatccgcagaaaatgcataaccattatgcgtacatctacaacgaactggtgtggaacgtgctcaaggacaccgttggtgaggaagaagctgtcttgtttgcccgctcggcctccgtcggtgcgcagaaattcccggtacactggggtggcgattgttacgctaactacgaatcaatggcggaaagcctgcgcggtggtttgtctattggcctttcaggttttggcttctggagccacgatatcggcggctttgaaaataccgctccggcgcacgtttacaaacgctggtgcgcgtttggtttgctctccagccatagccgtttacacggtagcaaatcttatcgtgtgccgtgggcctacgatgatgagtcctgtgatgtggtgcgcttcttcacgcaactgaaatgccgcatgatgccgtatctgtatcgtgaagctgcgcgtgcgaacgcgcggggtacgccgatgatgcgggccatgatgatggagttcccggacgatccggcttgtgattaccttgaccgtcaatacatgttaggcgacaacgtgatggttgcgccggtgttcactgaagcgggcgatgtgcagttctacctgccggaaggtcgctggacacacctgtggcacaacgatgaactcgacggtagtcgctggcataaacagcagcacggcttcctgagtctgcccgtttatgtgcgtgataacactctactggcgctgggcaacaacgatcaacgtcccgattacgtgtggcacgaaggcacggcattccacctcttcaatctgcaagacgggcatgaagccgtctgtgaagtgcccgctgctgacggatcggtgatctttactttaaaagcagcacgtactggcaacacgattactgtgactggtgcgggcgaggcgaagaactggacactgtgcctgcgcaatgttgtgaaagtaaatggtctgcaagacggttcgcaggctgaaagtgagcaggggctggtggtgaagcctcaagggaatgcgctgacaattacgttgtaatctattgatggaatgccgggtacgtctgagtcgtacccggcgagattgatgtttaccgcaccggctccgtcgatgtaacttcaccgctggaaacgatgccagcattcatggtttgagtcacttgctgctttgcggcgttcacggcatgcaattgcccgctaaccgtaggtttcaacgggacattggcctgaatatcgccactggcggtaagctgaatattgccgtcgccagtcaacggtaattcaggccatccccactgttgcaaaatattcaccggcacaccgcgtccattcaggctgatatgtgtctgacgttgtggcgtttgtgaaacactggcggtggcttccagaatgcctttttcagtaaatgcactcagttcgctgatattcaccgtgctgctgttggcggtcagcgccagcgacgggcgacgaacatcaacacgattgaatgtcgcggcggcggcattcagattcgccgagccactccagacgccccatttatgatcggtaaccagcgtcaggttggcaccgtaaccatcgagcgcggtgagctgccacgggaagtcagggtcgatatcaatgatcagattgcggctggcgctaaatctcttcagttgcaggctgtttaaccaaccgggtgtcgtttccatccacaactgttgccagtttttcggcaaggtatattccagcccggcaattgccgcatcatcaaggatcaacgttttcccgtcacgcagccagttccctgacgttctgaccatacccccttcccagcggctggtgaactggcgcagcgctacgccctgcggggaaaattccgtgtttataatcgggtcaaataaatgcagcgaaccataaatgaactcgctagcgttcatcgacagtttgccttcctgtgtctgccagtcatctttactgaaggtcatgttgcgcaagctgagatcgaggtcggtcaccgcccagtccggaccttgcaaacgagcatcgatcacttccaggcgaccaatctgcaacgacgggacagagcgtaatggcgcaaagaagtcggttagcgatttttcgctttgtagacgtatatccgccatgcgcaggttttccacttgccagctgccgtcggcgttacgctgcgcgtttccggttaatgtcccgcgggcgatgtcggcacccaggttagtcagcgtaacgcgatcgttatcaatactgccttcaatcagtacattggtggcaggaacatcattgagcgaaagcgatccggcactaaactgaatctgcgccttcgtacccagcactttaccggcttttggtgaccacggaactacgccgccatttacccgctgcgcgctcagtttccattcgctattcgggctattaaacgccatatcacgcagttgcagacgatcggctttgaacggtagcggcgcggtctggtcggtgagattcagcgtcccgttttccagcaggatggtatcgacatggcgtggttcggtcagttgccgactgcttagcgcaatgtcgacacttttggccaccagggtcgcgggctggccatcacgaccaaacgtgacgttctccagcacgatatgagatggcgcggaaaaacggtgatccatcgccccgaaggccagatgatagtcgctattctcggaaacccatgcgctgatatgttctgctccccagcgggtttgcagaagaaaatagaggccagcgatcgccactaacagagcgatgagaatgtagagaagcagcttcccaataaatttcatggtcttccatcccgtgaaatgcacataagggagttatgcacgatttacgcgcaatcctcaaggcgggaatggttaaagaggtgagactgcggcggtaattatcttaccgccgccagtgaattactgtttttctggtgggaaaatcagattcagcacgatggcagtaataccgcccgcggcgatcccggaggagagcaggtttttcagccattcaggggcaaactgcaaaatcagcggctgctgagacacgcccagaccaaccgccagcgacagcgcgataatcagaatcgcccgacggttcagcggctcacgagaaacgatacgcacaccggaggcggcgatggtgccaaacattacaagcgttgcgccgcccagaaccggttctggaatgtgttgtacaaaaccgctcactgccgggaacagacccagcacgatcaacatcagcgcgacgacaaaaccgacatagcggctggcaacaccagtcaactggatcactccgttgttttgcccgaagcaggagttcgggaaggtgttaaacaccgccgaaacaaacgagttcaggccgtttgccagcacgccgcctttcaggcgtttcatgtacagcggaccggacactggctgttcggaaacgtcagaggtcgccgtgatatcgccaatggtttccagcgaagtgatcataaagaccagcatcagcggcagcagcagactccattcaatgccaagaccgtaatagagcggcgttggcaccataatcagttcttgcgtcataggttcgttgctttctggcaacatgcccataaaccacgccagcgcatatccggccgccatcgcaattaccagtgaggccacgcgtaagtaagggttacgttgacggttaagcaggataattaaggctaagaccacgcctgccagcagcagatttttcggtgcgccgaaggtgttatcgctcatggctgcgtaaccgccgccaatggacgttaacccaacctgaattagcgacaggccgataatcatcaccacaacgccagaaaccagcggcgtaataatgcggcgcgccagatgcagaacgcgggagatcaccatctcggtgcaacttgccagcatcaacgtgccgaacaaagccgccatcatggtaggaacatcagcaccaccggttttcagcgcggtaccgcccataatcagcggggcaacaaagttgaagctggtgccctgaatagacaacagcccggagccaaccggaccccaggccttaatttgaataatcgatgccacaccggaggcaaacagcgacatactaataatgtgttgcgtgtcttgtgccggtaaacccagcgcctggcagattaatagcgctggcgtgatcaccgcaacgaacatcgccagcagatgctgacaggcggcaaacagggtttgaggaagcggcggacgatcttcaagacggtaaatcagttcgctgttttgagtctgcgcaaccggttgcgcattttctgactcgagggtggaaacagacatcgaaaacaatcccgtggtagcaaagcgggcattttagctgaccgaaagagaaaagcaaacgtttgccacatcctcatctaaatatttaaatgagataaatgcacttttttatataacttttggtatttttctgcttaaaatccatgccatttgttcattaacagctgagaatttgacccaggaaagcataactcgatacccgtcatagttcatgaagttgccactgcgcgatgaagtatgacgagtatgaaagagtgatgcggatacaaaggagtaactatgtttcatctcgatactttagcaacgcttgttgccgcaacgctgacgttgctgctcgggcgtaagttggtccattccgtctcctttttgaagaaatacaccataccggaacctgttgcgggtggtttgttggtggcgctggcgctactagtactgaaaaaaagcatgggctgggaagtcaactttgatatgtccctgcgcgatccgttaatgctggctttcttcgccaccattggcctgaacgccaacattgccagtttgcgtgccggtgggcgtgtggttggcatcttcttgattgtggttgttggtctgttggtgatgcaaaatgccattggcattggtatggctagcttgttagggcttgatccgctgatggggctgttggccggttctattactctttccggcggtcacggtacgggcgctgcgtggagtaaattgttcattgaacgttatggcttcaccaatgcgacggaagtggcgatggcctgtgcaacgttcggtctggtgctgggcggcttgattggcggtccggtggcgcgctatctggtgaaacactccaccacgccgaacggtattccggatgaccaggaagtcccgacggcgtttgaaaagccggatgtgggacgcatgatcacctcgttggtgctgattgaaactatcgcgctgattgctatctgcctgacggtggggaaaattgttgcgcaacttttggctggcactgcttttgaactgccgaccttcgtctgtgtactgtttgttggcgtgattctgagcaacggtctgtcaataatgggcttttaccgcgtctttgagcgtgcggtatccgtgctgggtaacgtaagcttgtcgttgttcctggcgatggcgttgatggggctgaaactgtgggagctggcttcgctggcgctgccgatgctggcgattctggtggtacagaccatcttcatggcgttgtatgccatcttcgttacctggcgcatgatgggcaaaaactacgatgcggcagtgctggctgcgggtcactgtggttttggcctcggtgcaacgccaacggcaatcgccaacatgcaggcgatcactgaacgctttggcccgtcgcacatggcgtttttggtggtgccgatggtcggtgcgttctttatcgatatcgtcaatgcgctggtaattaagttgtatttgatgttgccgatttttgccggttaaccgatgaagcggcggtagaagtgccgccgcaacaaagacaaatgcctgatacgcttcgcttatcaagcctgcgtattgattcataatttattgaatttgtagggtgatgaatcgcatccggcaggaaggtagggtaacctgaaatggcggtcttctcactgccgccttttacgcattcgagtaacgttccgtctccggcatccagcgttctatcagggcttttgcctgttgtgggtaacgttcgtgaatatggcgtgccaggcgctgaacttccgggatcatcgcctgatcgcgcagtaaatccgccactttaaattcagcattacccgtctgacgcgtgcctaacaattcgccagggccgcgaatctccagatctttttgcgcaatcacaaaaccgtcgttactgtcgcgcagcacttgcaggcgaatttgcgccgttttagaaagcggcgttttgtagagcagcacgcagtgagaagccaccgcgccacgacctacgcgcccgcgcagctggtgtaactgcgccagacccagacgctccgggttttcgataatcatcagactggcgttaggcacatcaacgccgacttcaataacggttgtggcaaccagcaggtgtagctcaccttgtttaaacgacgccatcaccgcctgtttctcggcaggtttcatccgcccgtgtaccaggccaacgttcaactctggtagcgccagtttcaactcttcccaggtagcttccgccgcctgcgcttccagcaattccgactcttcaatcaacgtacaaacccagtatgcctgacgaccttcagttatgcaggcgtggtgcacgcggtcaatgatgtcggtacggcgggtatcaggaatagcgaccgtagtcactggcgtgcggcctggcggcagctcatctatcaccgaggtatcgagatcggcatacgcagtcattgccagcgtgcgggggatcggcgtggcggtcatgatcaactgatgcggatggaagccctgctgctggcctttctcccacaatgccagacgctgatgcacgccaaaacgatgctgttcgtcgataatcaccagcgccaggccgttaaactgcacctgttcctggaagatggcgtgtgtaccgacaatcatctgcacctgaccgctggcgatggcttcctgctgtgccagccgtgctttacctttctgcttaccggcgagccagcccacttcgataccgagcggtgcaaaccagttgcggaagttattggcgtgctgctcggcgagtaattcggttggtgccatcaatgctacctgtttgccgtgggcaatcgcacgcaacgcggcgagggcggcgaccagcgttttaccggaacctacatcgccctgcaccagacgcatcatcggcacatccagcgccatatcgcgctcgatctccgccactacgcgtgcctgtgcgcccgttggcttgaacggtaaggcggcgaggagtttatttttcagcgtgtcattggcgctcagcggctgggcatgaaaacgctgtgctccggcacgtaaggctaacatgctgaggttgtgcgccagcagttcttccagaatcagacgacgttgcgccggatgctgcccggtttccagatcgctaagctgtagcgtcggtggcgggcggtgcaaagtgcgcaacgcttccggtagcgtcatcattccttgtgacagttccggcggcaggagttcttcaatggcgcaggtgtcgagcagatccagcgcctggtcggttaatttacgcagcgtggcctgctttacgccttccgttgttggataaaccggcgtgagcgtttcctgtaattctggcgtgctgagatcgccctgcacgcggtattccgggtggatcatctccgcaccatatttaccgcgctttgcttcgccataagccagtacacggcggcccgccgccaggctatttttcattgccgcgctgaaattgaaaaagcgcatggtgaggatgccggaaccgtcgctgatctggcaggtcatcatccgccgaccgccgaaggagatattgcagttcagcacttcgccttccaccgtggcataaacgcccggcagtagttctccgatggggtagagatgggtgcgatcttcgtagcgcaggggaaggtgtaagagtagatcctgcacggtatgcaggttgattttcgccagtttgttactaagtgctgcgccaacgcccgttagggaactgagtgggacagcatctaacaggcgacctttcatggcacttaccctgcagcctgcatagtagcccaccagtcggcatcagcttcgatctcgccttgctgattgacgtggggataaggcaggcctttgcgttttgcgactttcgccagcaccggatagccgccttcaaacaacaggcgttgttgctctgcttccggcaacatgctgttttcacgcaggtacatgcctgcattttgccgctgacgctgggcttcgtaaagaatgagggctgaggcaacggaaacattcagcgactgcaccatgccgatcatcggaatgatgatgtcctgatccgccagggccaatgcttcctgcgtgatgcccgttttctcctgtcccatcaaaatgcaggtcgggcgagtgtaatcaatttcgcggaaatcgacagcgttatcagaaagatgggttgccagaatctgcatgccctggcctttgagatgagcgacggcatcgccaatggtgcggtgtgttttcacctgtacccagctgttactacccgccgctgccgaagccatggtgcgcatgcggctaccaggccagacggcgtgaacttcatgtacgccaacggcatctgcggtacgaataatcgcagaaacgttatgaggtttgtggacctgctccatgcagacggtcagatcaggctgccgcctggcgagcatttcgcagatgcgtgcataacgtgttgggttcataaaacattaatttcggtttcgggtgactttaatcacgtctggcatcacgcggattttgcgcatgatattcgccagatgcacacggtcacgagcggtcagacgaataaaggcgctgtagacgcgaccatctttctcttccgtattcaaactttgaatattcgaagtcgtggtgttaattgccgccgtcaggtttgccagcgcaccctgatgattgaacatctccaccttgatttcggtgatgaactcctgcgccgtctctttatcccattccacagccataaacttctctggctctttctggtagccacggatattacggcaggattcatggtggatcaccagacctttaccggggctgacgtgggcgataatcgggtcgccaggaatagggcggcagcatttcgcaaaggtgatcagcacgccatcggcacctttaatgggcagatgtccgtggctttgggttgccggtggaatggaggcgtccccatgttgcagatttttcgcgaccaccacgctcattgcgttaccaagtccgatttctgccagcagatcgtcaagcgttgccagcttcatgcgatccagctcgcgctgaatattttcctgcgggatttcattcagcttacggctaccacccaaagcatggttgagcagacgacggcccaggcttacagaatcatcacgcttgaggtttttcagcaactgacgaattttggcgcgcgctttcgagctaacgacaaagttcagccaagcggcattcgggcgagcgcccggagcggtaatgatttcaacggtttgaccgctggtaagcggctgcgacagcgggtaaggctggcggtcaacgcgtgcgcccacgcaggcatgaccgatatcggtatgcactgcataagcgaagtcgacgggcgttgcaccggcaggcagctcgacaatgcgcccttccggtgtgaaaacgtaaatctcatccgggaagagatcggatttaacgctctcgataaattcaaacgaactaccggcgctctgttgcagctccagcaggctttgcatccagcgctgggcgcggatttgtgcggtagtactggtttcgccgtgctctttataagcccagtgcgcggcaacacccatctccgccatctggtccatatcttcggtacggatctggacctcaaccggcacaccgtgcgggccgatcatcgaggtgtgcaaagactgatagccgttcgcttttggaatggcgatatagtctttcacgcggcccggacgcggcttgtacaggctgtgcatctggcccagcacgcgataacaggtgtcagaatcattgacgatcacgcggaaagcgtagatgtccatgatcgagtgaaaacgctgctctttgagcaccattttgcagtaaatcgaataaagatgcttctcgcgaccactgacgcggcacggtattcccgcttcctgcaaacgcccttcgatttcagaaagaatcttctggatcatctctttacggttgccgcgcgcggctttcaccacttctttgattacgcgataacggttgggatacagcgcctcaaaacccagctcttcgagttcggttttaatgtggtggatacctaaacggtgcgccagcgggctataaatttcgagagtttcacgggcgatgcggcgacgtttgtccgggcgaagtgagcccagcgtgcgcatgttgtgggtacggtcggcaagtttgatgaggatgacgcggatatcctgcaccatcgccataatcatcttgcgaaagttttcggcctgcgcctctttcttatcgcggaacttgagtttatcaagtttcgacaccccctctaccagctcggcgacgcttttaccaaaaagctgttccatatcctggtaggtggcgggagtatcttcaatcacgtcatgcagcagcgccgccatcagcgtttcatagtcgagtttcatctcggccagaatgcaggcaaccgctaccgggtgcgtgatatagggttcaccgcttgaacgtgtttgcccctcgtgagcatcacgtgcaacgagatacgcctgccgcagacgcttgatttggtcttccggcaggtaggtttgaatcagttgattcaggctttcaaacagatacaagggcgacccgctttgtgattaacgacgaccttcagcaatagcggtaacggcttgtaattcagcggcttcctgctcttgctgttcctggcgttcgcgaacgtcgaggatctggttgttgatcagaccttcttcgatttcgcgcagcgcgattacagtggttttatcgttttcttccggtaccagcggatcctttccgcctacctgcatctgacgagcgcgacgcgcggcgaccagtaccaggtcaaaacggttaccaattttctctacagcgtcctgaacagttacgcgtgccatacttaaaaagctccacaggtgaagaaatgactgggcatgatactgaaatcaggttcagtctgccaacaatttgctgattaaagcgtcatgacgctgcttttggcggctcatgcgcagacgttcggcgcgaataatggtcttcaaatcggtcaacgcggtatcgaagtcatcattcacaatcagataatcatattcggcgtaatggctcatttctgcaacagcttgcgccatacgctttgcaatgacctcttcgctgtcctgaccgcgaccgcgtagacggcggtccagttcaattttggacggcggtaaaataaagatactccgcgcgtgcggcatcttctggcgaatttgctgcgcgccctgccagtcgatatcgagaaaaacatcgacaccggtcgccagtacttgctcaatggcctcacgcgaagtgccatagtaattaccaaaaacttctgcgtgttcgaggaacgcatctctgctaatcatttctttaaattcatcatgattaacaaagaaataatgttcaccgtggacttcaccaggacgcggttggcgtgtggtgtgtgaaacagaaacctgggtgtcatacaacggttgggtttttaataaagcctgaatcaggctggatttacccgcgccactgggggcagaaacaatataaagcgtgccttgagccatgagtatctttcgtatgtgattagcgaaataaagcctacatacgagcttattatacacggcgcggccatgtgacgtagcccttgctcacactttttgcgcaaagttgttgcgttttgcgtagctgcttccgcatttgcctgtcattcactgcaataaagacgattttcaggaagcgtcctcgcagactccgtttttgccactcggctttgctttcatcacgttgtatatctgcctgactatctacagcggaggtgatgatgaaagtatggatggcgatattaataggtatcttgtgctggcaatcatctgtgtgggcggtctgtccggcctggtcgccagccagagcacaggaagaaatttcccgcctgcaacagcaaataaaacagtgggacgatgactactggaaggaaggaaaaagtgaggtggaagacggtgtttacgatcagttaagcgcccgtcttacgcagtggcaacgctgctttgggagcgagccccgcgacgtgatgatgccgcctttaaatggtgcggttatgcatccggttgcccatacgggtgtacgcaaaatggtggataaaaacgcattaagtctgtggatgcgagaacgtagcgatctttgggtgcagccaaaagttgatggcgttgcggtaaccctggtttatcgggacgggaaactgaacaaagcaatcagtcgcggtaatggcctgaaaggcgaggactggacgcagaaagttagcttaatttccgctgtgccgcaaaccgttagcgggcctttagccaacagtacgcttcagggggaaatatttctccagcgcgaggggcatatccaacaacaaatggggggaataaatgcccgcgcaaaagttgctggcttgatgatgcgccaggacgatagcgacacgctgaattctctgggcgtttttgtctgggcatggccggatggaccgcagttaatgtctgatcgtttaaaagagctggctaccgcaggttttactctaacgcagacgtatacccgtgcggtgaaaaatgctgatgaagttgcgcgcgtacgcaatgagtggtggaaagcggaattacccttcgtcaccgatggcgtagttgtacgagcggcgaaagagccagaatcccgccattggctaccgggccaggcagagtggctggtggcctggaaatatcaacctgtagctcaggttgccgaagtgaaggcaattcagtttgcggtgggtaagagcggtaaaatatcggtggttgcgtcactcgcacctgtcatgctggatgataaaaaagtccagcgggtgaatattggttccgtcaggcgctggcaggagtgggatattgcgcctggtgatcagattctcgtcagccttgccggtcagggtattcctcgcattgatgatgtggtgtggcgcggtgcagaacgtacaaaaccgacaccgccagaaaaccgctttaactcgttgacctgctactttgcttctgatgtttgtcaggaacagttcatttcacgcttagtctggctgggggcaaaacaggttcttgggctggatggcattggtgaggccggttggcgcgcgctgcatcagactcatcgctttgaacatatcttttcctggcttttattaacgccagagcaattacagaacacgccggggatcgcgaaaagtaaaagtgcgcagctatggcatcagtttaatctggctcgtaagcagccttttactcgctgggtgatggcaatgggaataccgctaacccgggcggcgcttaatgccagtgatgaacggtcctggtcgcaacttttatttagcacggagcagttctggcagcagctgccggggactggatcgggacgcgccagacaggttattgaatggaaggaaaatgcgcaaatcaagaagctgggcagttggctggctgcccagcagatcacaggttttgaaccttagtgtccttcgtggctgtagtaaaagaccggtaatcccagcttaaggcgtagcgccagtaagcgggcaaaaaagccgaataccagggtggagataattaccacatcatggttagaaacatagtgttgcagcgcgatgtacagcacggcggaggcaaatgagacaccggcatacaactctttctggaataccagtgggatacgtttacagaacatatcgcgcaaaacgccgccaaacacgccggtggttaccgccgcgacaacggcaataattgggccgtgccccatatccagtgcaacctgtgccccgatgatagaaaagaccaccagtccgagcgcatcgagcaccagaaacactttgcgcaggtaaggcattacaggagcaacgatagtggtgagtactgcggcggtagcgacgataatcacatattccgggtgtttgacccagccgagcggatagtggcccagcagaatatcgcgcactgaccctccgccaattgcggtggcggtcgcaataataattacgccaaatgtatccatgcgccgtcgtccggccgccagcgcccccgtcatggcttcggcagtaatgccaaccaaatacaaaatgtgtaacagcatggttctctccctaaaaatctgtctggcagggtagcgatttgtgcgcattgtcacgattgagattttttaaggggaggggaaattgataacttgtagttatgtgaaatcgctattttctgtagcagagatgcattcttctgacttcttgtctgagaaaatgcataagaaaaaataggttaaaactgagggggaaaagaaaggtgcaatatttagccattgtgttcactgcacctggaccttggcttacgcatcgggtgtctcaatcaacaaaaagagtttttagtttctgctatttcttctctgtaatttttacactgttttccaactgcttgatgctgacctgcggggtcggcaactcctcaggcatggttccgccaagttcctgaatggtttgcctcaccttgcgacccacgtcaaagtgtgtggtgtttgcttgctgttttgaattcacgccatcccgcttgagtttttcttctgtttgggtagctcgaaagagattagccgccagttctgttgaacccatatgatccaggatcttctgattctttttcagccccttccgctgatgaatagctttctgatctaatccaccatacagcccctggtaaccatgattctgaaatatggcgaaatcagtagctgtcgctaccccagcttgctgtgctgcctcaaccaattgtttgttatgttctttcaactcatttctcagaaacagacgcttttcgtcttcacgaagttgcttaaatgcttcatcgtcagcaagctcctgccgtcgggtctggatagcaaaataagtctgccctgccgcaatgaccggtttcgcagggtcgccgttttgtactaccaggtaacaggcatagcgggagagtacgatgtcttttaatgctcttttggcatttgagccaattttgaccatatcgaggatctcctcgaaatggtcatcaattgtgtgaccactgttctcacaggcttctttggcgcgcgttaatacaggtataaagtgacgatactctgaataacccagtagtttcccaagttgtcttgctgaccattgttctgctccgtttgcattaatcagttttatctcttcaaaaggttgatgatgttcgttcattgcccactccatgtgatatcaattgcaaagaaagtaaatctgtaactgtatttatatacagttgtgagtatctcacgttctcagtgtgctgggcaaaaaaacatcgcaaaatctggagcaggcacgcaaaacagaattgaatgttgcggggaagaaaaatgccgctctgtttgagtggcggcatttgtgaaggcggaaaagtaagaattggcgttacgagttattcgatgttctgaatctgctcgcgcatctgctcaatcaacactttcagctcgatggcggagtttgtcacttcggcattgatagacttcgacgcaagagtgttcgactcgcggttgaactcctgcatcataaaatccagacgacgaccaaccgcttcttttttcttcagaatgttgtaggtctctttgacatgcgcttcgaggcgatccagttcttcggcaacgtcaattcgttgtgccagcagaaccagttcctgctccagacggttgttttccagttgcacctgagcatcttccagcttcgcgaccagacgctcacgctgccattgcaggatttccggcatatgggagcggactttgaccacttcggcggtgacgccttccagacgctgctcgatcaatgctttcagtgcctgaccttcggtttcgcgcgcgacaataaagtcgtccagcgtaccatccagcgccgcgagaatttcagcggcaatggcgtcaagatcctgctcctgggctgccatcacgcccggccagcgtagaatatcaaccgggttgatttccccttcgtcactctgcatttttacccagttcgcggcagttaccagctgtttagccagtttttcgttgaggatcagctcaccttgcgcgctaacatctggctcatagcgcagggtacattccactttaccgcgcgtcaggcgagaacgaatacgctcgcgaacgacaggttcaaggctacggaactgctccggcagacgaaagtaagtttccagataacgctggtttaccgagcgcatttcccaggttgcgctcccccattcacccttgatttcacgccgggcgtaggcggtcatactgcggatcatagacgttcctgtttataaaaggagaggtggaaggattatagccatcgatgccttgtcaggataggaataaccgccggaagtccgtataatgcgcagccacatttgtttcaagccggagatttcaatatgcgtccagcaggccgtagcaataatcaggtgcgtcccgttaccctgactcgtaactatacaaaacatgcagaaggctcggtgctggtcgaatttggcgataccaaagtgttgtgtaccgcctctattgaagaaggcgtgccgcgcttcctgaaaggtcagggccagggctggatcaccgcagagtacggcatgctgccacgttctacccacacccgtaacgctcgtgaagcggcgaaaggtaagcagggtggacgcacaatggaaatccagcgtctgatcgcccgtgctcttcgcgcggcagtagatttgaaagcgctgggtgagttcaccattacgctggactgcgacgtgcttcaggctgatggtggcacgcgtaccgcgtcgattacgggtgcctgcgtggcgctggtagatgcgctacagaagctggtggaaaacggcaagctgaaaaccaatccgatgaaagggatggtagccgcagtttctgtcggaattgtgaacggcgaagcggtttgcgatctggaatacgttgaagactctgccgcagagaccgacatgaacgtagtgatgaccgaagacgggcgcatcattgaagtgcaggggacggcagaaggcgagccgttcacccatgaagagctactcatcttgttggctctggcccgaggggaatcgaatccattgtagcgacgcagaaggcggcgctggcaaactgatttttaaggcgactgatgagtcgccttttttttgtctgtagaaaagtaagatgaggagcgaaggcatgaaaccatatcagcgccagtttattgaatttgcgcttagcaagcaggtgttaaagtttggcgagtttacgctgaaatccgggcgcaaaagcccctatttcttcaacgccgggctgtttaataccgggcgcgatctggcactgttaggccgtttttacgctgaagcgttggtggattccggcattgagttcgatctgctgtttggccctgcttacaaagggatcccgattgccaccacaaccgctgtggcactggcggagcatcacgacctggacctgccgtactgctttaaccgcaaagaagcaaaagaccacggtgaaggcggcaatctggttggtagcgcgttacaaggacgcgtaatgctggtagatgatgtgatcaccgccggaacggcgattcgcgagtcgatggagattattcaggccaatggcgcgacgcttgctggcgtgttgatttcgctcgatcgtcaggaacgcgggcgcggcgagatttcggcgattcaggaagttgagcgtgattacaactgcaaagtgatctctatcatcaccctgaaagacctgattgcttacctggaagagaagccggaaatggcggaacatctggcggcggttaaggcctatcgcgaagagtttggcgtttaaagaaactcgccggatgaaaagtcatccggcgtcatattactgcaactgtgccgcaattagcggccagcgggcgtcaaaatcatccgtcgggcggtatttaaattcgctgcggacaaaacgtgacagcataccttcacagaaggccaggatctggcttgccagcagggtttcatcggtggtgtaaccttcaccctcacgcattctcttttcacgcaatacctggcgcagctgcgcttcaatacgctcgaacagctggttgatgcgcccttgcaggcgatcctgttcaaacattagcgcatgaccagtgaggatgcgggtcaggccaggattacgctcaccaaaaccgagaagcagcaacacaatcagacgcaggcgcgctgtggtgtctttctcatctttcagaatcaggttgatgcgagtaatcaggctatcttcgataaactcaatcaggctatcgaacatgcgggtcttactggggaagtggcgatacagtgccgcttcggaaacgccgacagaggcggccagttttgccgtcgtgatacgttggcttccatcgctggattccagcatcagcgccagagactgaagtatttcctcgcgacggttccttttcgcagtttgtttttctgccatgttacaaaatacccctgaaaataagcacttgccaggcggcacccacgctatgaccgcaaacgaaatgtttgcggctatgttatgacgttattcggatgcgtatgtgttactgacgaccagagtgaccaaagccgccttcaccgcggtcggtggcgtcgaaatcttccaccagattaaattcagcctgtactaccggaacaaaaatcatctgggcgatgcgttcgccaggttgaatggtgaagctgtcctgaccacggttccacacggaaatcatcaactggccctgatagtcagaatcgatcaatcctaccaggttaccaagcacgataccgtgcttatgtcccaatccggagcgcggcagcatcattgccgccagtgaaggatcggcaatatgaatcgccagcccggtcggaaccagcgtagtgtcacccggagccagttctacggcgtcgttgagacaggcacgcaggtcaagtccggcagagccagaggtggcataagtcgggagcggaaattccttcccaacgcgcgggtccagaatcttaacgtcgatttttttcatcataacgggtcacgatctcgtcgagtaataattggccaaggagctctttgcgctcaagcggtaagactttatctccgtcctgccagaaaaggtgtaatgcgttgttgtcgctgttaaatccttgagttggctgggaaacatcgttcgcgcagatcagatcaaggtttttacggatacgtttttgccgggcgtattcttccacattatttgtttcggcggcaaatccaacgacgtagggtcgatggtcttttagtgcggcaacgcctgcgacgatatcggggtttttaaccatttttattgttaattcatcaccctgcgtggcctgctttttgattttctctggggccacggtagctgcgcgataatccgccacggcggcgcagccgataaaaatattttgctgctgtacagaagcattcacggcggcttccatttccagcgcggtcatcacatcaacacgtttaacaaacggtggcgtcggtagtgaaaccggacctgataccagcgtgacgttcgcgccacgacgggcagcggcggcggcgatagcaaaacccatcttgccggagctgtgattagagatataacgcaccggatcgagcggttcacgcgtcgggccggcggtaatcataatgttcagatgtttcaggtcgttgacgggcgaaaaatgcgctaccgccatatccacaatggttaacggatcgagcattcgcccaggaccgatatcaccacaagcctgactgccactgtctggcccccagatgagcaaaccacgggaagcaagcacctctaaattatgctgcgtggcagcggcacggtacatctgctggttcatggcggggagcacggctacaggcgcaggtgtagccagacaaatcgtcgataccaggtcattcgccattccggcagcaacacgggcaatcaaatctgccgtggcaggggcgagaatcactaaatcagcccatttacccagctcaatatggcccatagcggcttcggctgccgggtccagcagactgtcggaaacgggataaccagaaaccgcctgcaagctaagtggggtgataaaggcttttgccgcttcggtcatggctacgcggacgtcggccccgcgatcgcgcaaacgacgcaccagttcaggggttttataggcagcaataccgccgctaacgccgagaacgatttttttaccggccaggctcatgatgatttttcctgtagggtgacaccagaagttggcgattttatcacaatacttttgttgtcgtgccttcacctgagattcactttgcgaggcgctttccaggattgaaaactggccgtcgatttaacgaaacggctatgacaggatgcgagcaccacaaaggaggtgaaggtgaaaaacaattcacagctgttgatgccgcgcgaaaaaatgctgaagtttggtattagcgccttaacggatgtcgagctgctggcgctatttctgcgtaccggaacgcgcggtaaagatgtattaaccctggcaaaagagatgctggagaatttcggctctctttatggcttgttaacctctgaatatgaacaatttagtggcgttcatggaattggcgtggcgaaatttgcccagttaaaggggattgctgaactggcgcggcgttactacaacgtgcggatgcgtgaagaaagccctttactcagcccggagatgacgagggaatttttacaaagccagctcacgggtgaggagcgggagatctttatggtgatctttctcgactcccaacaccgggttataacgcataggcgtcttttttccggcacgctaaaccatgttgaagtccatcctcgggaaattatccgcgaagcgataaaaataaacgcctcggcgctgatccttgcacataatcacccttcgggttgtgctgaacccagtaaagcggataaactcattactgaacggataataaagagttgtcagttcatggatttacgcgtgctcgaccatatcgtgattgggcgtggagagtatgtttcttttgccgaacgcggctggatttaacccgctatgcgcgatccttcgggatctttgtctgttcgggacttgagcacatcgctgagtcagcgtatactacgccacctttgagaatctcgggtttggcatttgggcctggcaatcgagagttcacatagaactgcgatgaccgggctgtaaagcctgacgaggcgccaataccccatacgaagctcgagctaatttgatttttggagaatagacatgtcccgagtctgccaagttactggcaagcgtccggtgaccggtaacaaccgttcccacgcactgaacgcgactaaacgccgtttcctgccgaacctgcactctcaccgtttctgggttgagagcgagaagcgttttgtcaccctgcgcgtatctgctaaaggtatgcgtgtaatcgataaaaaaggcatcgatacagttctggctgaactgcgtgcccgtggcgaaaagtactaagtacttagaggaaataaatcatggctaaaggtattcgtgagaaaatcaagctggtttcttctgctggtactggtcacttctataccactacgaagaacaaacgtactaagccggaaaaactggaactgaaaaaattcgatccagttgttcgccagcacgtgatctacaaagaagcgaaaatcaaataattctcgctttgatgtaacaaaaaacctcgctccggcggggttttttgttatctgcttgcccccatattgactgcatctgttcattcctggagatgctatgcctgaattacccgaagttgaaaccagccgccgcggcatagaaccgcatctcgttggtgcaaccattcttcatgcagtggtgcgcaacggacgcttgcgctggccggtttcagaagagatctaccgtttaagcgaccaaccagtgcttagcgtgcagcggcgggctaaatatctgctgctggagctgcctgagggctggattatcattcatttagggatgtctggcagcctgcgcatccttccagaagaacttccccctgaaaagcatgaccatgtggatttggtgatgagcaacggcaaagtgctgcgctacaccgatccgcgccgctttggtgcctggctgtggaccaaagagctggaagggcataatgtgctgacccatcttggaccggagccgcttagcgacgatttcaatggtgagtatctgcatcagaagtgcgcgaagaaaaaaacggcgattaaaccgtggctgatggataacaagctggtggtaggggtagggaatatctatgccagcgaatcactgtttgcggcggggatccatccggatcggctggcgtcatcactgtcgctggcagagtgtgaattgttagctcgggtgattaaagcggtgttgctgcgttcgattgagcagggtggtacaacgctgaaagattttctgcaaagtgatggtaaaccgggctatttcgctcaggaattgcaggtttacgggcgaaaaggtgagccgtgtcgggtgtgcggtacgccgattgtggcgactaaacatgcgcagcgggcaacgttttattgtcggcagtgccagaagtaattcatgcgcgccggatggcataccatccggcataaacgctacgctaacttcgccatcagcgcctgatggacattctccggcaggaaatgggtgacatcgccctgatggcgcgccacctctttcaccaacgatgaagagataaacgaccactctttcgacggcatcagaaacacactttccagttccggcattaagtggcgattcatatgcgccagctgcatttcatattcaaaatctgccaccgcacgcaggccacgaatcagcaccgtagcgtgttgattacgggcgaagttcgccattaaatcactaaacccgaccacttccacgttccccagatgcgcggttgcctgctgtgccagtgccacacgctcttccagggtaaacatcggttttttactggggctggcggcaatcgccagaataacgtgatcgaacatctgcgtggcgcgcgtcacgatatcgatatgaccattggtaatgggatcgaaagtacccggataaatcgcccgtttttgcataacaacctcaatgcgttttcggtggcaggtaaggttccagcagttgaagcagacgctgtagcgcgccctggttttgatacagtacttcaacggcatgacggccatagaaactacggtaatcggcgtcggtgagtaaagaggaaacctcttttgcaagcgtagtggcatcggtaacggtaatcagcccgcttgcctgctccagccgcgcgcaaatgtctttaaagttaaaagtatgcggccccatcaataccggaatagcgtgtgcggcagcttccagcggattatgcccaccacgttcaaccagtgaaccgccaacaaaggcgagatcggcaatgccatacagtaacatcaactcgcccatcgtatcgccaaccacaacctgcgtgctggtggaggggacttcccctgaagagcgtgtgatatagcttagtccagcctggcggacaaggttaatcgcatccgggaagcgttccggatgacggggtaccaggatgagcaataaattcgggaattgctgtaacaatgcctgatgtgcggcgatcaccacactctcttcgccttcgtgagtgctggtggcaatccataccgggcggtgtggtgcccactggcggcgcagcgtcacggctttagcagccaactgcggcgttacagaaatatcgaatttcaggctaccggtaacggtcacctgattattttttgcgcccagcgccacaaaacgtgcaccatcttcttcattttgcgcagcaatcagcgtaatacgacgcagcaagcgacggacgaatttacccagtttggcataacctgcggccgagcgggcagagagtcgcgcgttagcgatcaccagcggaattttacgtttatgtagcgccgcaatcaggttaggccatagttcggtttccataatcaacaccagtttagggtcgactttattcaggaaacggttgagtgcatcgggcagatcatacggcagataaacgtgctgaacatccttcccgaaagccgattgtacgcgctccgaaccggttggcgtcatggttgttacggtaatcggtaaatcaggataacgatgacgcagcgcgcgcaccaacgggattgccgccagagtttcaccgacggagacggagtgcagcataatgccgcctggttttagcggatggcggtaaaaaccgtaacgttcaccccagcgttttcgataggccggagccttacgtccgcgcacccagagccgtatccagatcagcggctgaataaggtagagaagggcggtgtaaagcaattcgagcatagtaaatagctgacttatggatgtgctggggattctatgtatttagctgtggctttaccattacttttcccgtttttgacttaaatagcttcagtttggtctgatctgccgctacatcttcattttttttgtatttttatgcgattcattgaaactcggccccattttcaaatctacataggccgtactgacattatcgaaatgctattttttatctatttgatttttatgattaaagtatattttgtgtataaaaatcattcgggtcggattgctgcgaaagaaatgatacactagcacgtcaaagtaagtgcgttatcagtattcaggtagctgttgagcctggggcggtagcgtgcttttttctgcttaacttaaccagacaatcacacaaaagagtcgctagtggaaaagccatttcgaaaaatcctggtcataaagatgcgatatcatggggatatgttattaactactcctgtcatcagtacgctcaagcagaattatcctgatgcaaaaatcgatatgctgctttatcaggacaccatccctattttgtctgaaaacccggaaattaatgcgctctatgggataagcaataaaggtgcgggaactttcgataaaattaaaaatgtgctttcgttgataaaaactctgcgtgcgaataattatgacctggtcattaatcttacggatcagtggatggtggcgctgctggtacgttgtttacctgcacggatgaaaatatcgcaactttatggtcatcggcagcatggtatttggaaaaaaagcttcacacacttagcgccaatacacggtacacatattgttgagcgtaatttatcggtccttgagccattaggtattaccgatttctacaccgacacaacaatgagttacgccgaagattgctggaagaagatgcgccgggaattagatgccctgggcgtaaaagatcattatgttgtcatccaaccgacagcgcgtcagatatttaagtgttgggataacgataaattttctaaggttatcgatgcgctgcaacagcgaggctatcaggttgtgctaacctgtgggccctcggcagatgatctcgcttgtgtagatgagattgcacgaggttgcgaaacaaaacccattactggccttgcaggtaaaacacgttttcctgaactgggtgcattaattgatcatgcagtgctttttattggtgtggattctgcgccgggacatattgcagcggcagtgaaaacgccagtcattagtctatttggtgcaacggatcacgtattctggcgtccctggaccgagaatattattcaattctgggcggggaattatcagaaaatgccgacccggcatgaacttgaccgcaacaaaaaatatctttctgttatcccagcggaggatgtgatcgccgctacggaaaagctgttgccagaagatgccccttcagctgacaggaatgcacaattatgatcgtggcgttttgtttatataaatattttccatttggtgggcttcaacgtgactttatgcgcattgcatcaacagttgccgcacggggccaccatgttcgggtatatacacagtcgtgggaaggcgattgcccgaaagcatttgagcttattcaggtgccagttaagtcccataccaaccatggacgcaatgcagaatattatgcctgggtacaaaatcatctcaaagagcatcccgcagatcgcgttgttgggtttaataagatgcctggcctggatgtttattttgccgctgatgtttgttacgccgagaaagttgcgcaagaaaaaggttttttatatcgtttaacatcacgatatcgccattatgccgcatttgagcgagcgactttcgagcagggtaaatcgacgaaacttatgatgctgaccgataagcaaatcgccgatttccagaagcattatcaaactgaacctgaacgttttcaaattcttcctcccggtatttatccggacagaaaatacagtgagcaaatcccaaacagccgtgaaatttatcgccagaaaaatggcataaaagagcaacaaaacttattactgcaggttggatcagattttggccgtaaaggtgtagatcgctcaattgaagctttggcatcgttaccggaatcattacgtcacaatacgcttttatttgttgttggtcaggataagccgcgaaaatttgaagcgctggcagaaaaactcggcgtgcggagcaatgtgcatttcttctccggtcgcaatgatgtgtcagaattaatggcagccgctgatttattactgcatcccgcttatcaggaagccgcgggtatcgttcttctagaagcgatcactgctgggttacctgttttaacaacagcggtatgtgggtacgcgcattatattgcggatgccaattgtggaacggtcatcgctgaacctttctctcaggaacaattaaatgaagttttacgtaaagcgttaactcagtcgccattgcgaatggcctgggcggagaatgctcgccattatgccgatactcaggatttgtatagcttgccagaaaaagccgcggatatcattacaggtggtttagatggttgaattaaaagagccgcttgccacactttggcgtggtaaagatgcttttgcagaggtcaaaaaactgaacggcgaggtctttcgtgaactggagactcgtcgtacattacgctttgaactgtccgggaaaagctattttcttaaatggcacaaggggacgacattaaaagagattataaaaaatctactctcattgcggatgcccgttttgggcgcagacagagagtggcacgctattcatcgcctgagtgatgttggcgttgatacaatgaagggcattgggtttggcgaaaaagggttaaatccattaactcgcgcatcatttattattaccgaagatctcactcccacaattagccttgaagattattgtgccgattgggcagtcaacccgcctgatatacgtgttaagcgtatgctgatcgcacgtgtagcaactatggtgcgtaaaatgcatactgcagggataaatcaccgcgactgttacatttgccactttttgcttcatttgccatttactggccgggaagatgaattaaaaatttcagttatcgatctgcatcgggcacagatacgtgcaaaagtaccgcgccgctggcgcgataaagacctgattggtttatatttctcatcaatgaatattggcctgacgcaaagagatatctggcgatttatgaaggtttattttgggatgcctttacgcaaaatattgtctcttgaacagaatttattgaacatggcaagcgttaaggccgagcgtattaaagagcgaacacaacgcaaaggattataaaaatatttattagtatgtactggaactaactttattatgactatttattttataaattgggttgcagattatgaattaaaaatgattcagtacctgaaaaaaaagtacaagataaaaaatataacaacaccaaaaaaatataactggattaataaaaaaatatcaaaaatagggatggataatgcatggctggggcgattattcatcaagcattacctcaatgatattaaaaaagatgacataattatcattaatgacagtgttgttaataaaggtatcaataaacaaatattaaaaaatattaactgtcataaagttttgcttctaagaaatactgttggcgaagattttattcttgataacgcgaattatttcgatattatatatgattttgagcatagatttatagggaatgaaaagatcaaggcaatagaacaattttttcctataggaatggatgaaattagaaattatagtttatctgacaaaaataacagccagccaatatgttttttccttggtcgtgataaagggcgtcttcaaataattaatgagttagccgagagattaacaacactaggatgtaagctagattttaatgttgtcaaagataagacatcatctacgacttcaaagtatttgattgaaaaacaaatatcttatgaagagaatattagaagaacattaaatgctaatataattgttgatataaccaaagaaaaccaatctggctggactcttcgtatacttgaggcactatttttcaataaaaaattaattactaataatataaatgtatttggttcagaaatctatagtgaatctcgcttttttataataggtcatgatgattgggataagttagagtattttattaactcatctgttaaaccaatggattatgatagtttatataaattcagtccagataaaatgatgtcaacgattgtttctgattttatagacaaataaaaccgttaaaacagtgagttttactcaattaatgagagtttctatgaaaatagcgtttatcggcgaagctgtttctggatttggcggcatggaaactgtcatccgtgatgttattactaccttcaggcaacaacatatccaaagtgaaatgtttttcttttgtcgtaatgacaaaatggataagggatggctggaaggtattaaatactcatgttcattttccaatattcgtttaggttttttgcgtcgggcgaaacatattcatgctctaagtaaatggcttcaggagtaccaaccagatatcgttatttgtattgatgtgatctcctgcctgtttgccgcaaaagcacgtaaaaaatcaggaattgatatgccagtattttcatggccacatttttctttagatcacaaaaaacatgctgaatatatcacctgtgccgactatcatttagcaatcagctctggcattaaacagcaaatgattaatcgaggtgtagcagaatcgacgataaatgttatttttaatcccgtcgaaactaaagactcagtcattcccgcgcccgaggaaggtgaaacggcaacgtttatttatgttgggcgtatgaaatttgaaggccagaaaagagttaaagacctgcttgatggcttatcacaagcgaaaggtaactggaaactccatgtattgggtgatggctccgatttcgaaaaatgccaggcttatggtagagaattaaatattgatgatcgaattgtctggtatggttggcaacaatatccctgggaattggtccagcaagatattgaaaaagtgagtgcgttattgctcacgtcatcttttgaaggtttcccaatgaccctacttgaagccttgtcgtgggggattccttgtatcagtgccgattgtgtctccgggcctgctgacattattcaacctgatgtcaatggccatctgtatcaaccgggagatattgctggttttgtaactcttctaaataaatatatagcaggtgaaattcatatcgaacatgaaaaaattcctgcgtcgatcgatgaattttaccaatcgaagtattacgatagattacataaggtaattatttctgctatttcccggaggaaataatgcagcaggtgtttttccaggaaactgagtttcttaattcagttattgattatgatcataaagtagaaacagaaaatctttgtctggacatcgcttatggaactgacaaaaactttctatttggttgcggaatttcgattgcttcaatattaaaatataatgaaggaagtcgattgtgtttccatatttttactgattattttggtgatgatgatcgtaagtattttgatgccctggcgttgcagtataaaaccagaattaaaatatatctgattaatggtgatcgactgcgctcattgcctagcactaagaattggactcatgcaatatattttcgttttgttattgcagattactttattaataaggcgcctaaagtcctttatctggatgcagatatcatttgtcaggggactattgagccactaattaatttctcatttcctgacgataaagtcgcaatggttgttacagaagggcaagctgactggtgggaaaaacgcgcccattcgttaggtgttgcgggaattgctaaaggttactttaactccggttttttattgattaatactgcccaatgggcggctcagcaggtttctgcacgagctattgcaatgctaaatgagccagaaataatcaaaaaaataacacatcctgatcaggatgtgttaaatatgttgctggcggataaacttattttcgctgatattaaatataacacccagttcagcttaaattatcaactcaaagaaagctttataaacccagtaaccaacgatactatttttatccattatatcgggccaaccaagccctggcatgattgggcctgggattatcctgtatcacaagcctttatggaggcaaaaaatgcttcgccatggaagaatacggcgttgctgaaaccgaacaatagcaatcaattaagatatagcgcaaaacatatgcttaaaaagcatagatatctaaaaggatttagcaactatcttttttattttattgaaaagataaagcattaaaactgggaaactataaagtaatgatataagggtagcattgtggactcatttcctgccatagagatagataaagttaaagcctgggattttcggctagctaatataaatacttctgaatgtttaaatgttgcctatggtgtcgatgctaattatcttgatggtgtaggtgtttccatcacatcaattgtcctaaataatcgacatattaatcttgatttttatattattgctgatgtttataatgatggtttttttcaaaaaattgcaaagcttgcagagcaaaaccaattaagaatcacgttatatagaattaacactgataagctccagtgcttgccttgtacacaggtctggtcaagagcaatgtacttccgtttatttgcatttcaattattgggtttaacgcttgatcgtttgctttatcttgatgcagatgttgtttgtaaaggcgatattagccaactattacatctgggtttaaatggagcggttgctgctgttgttaaagatgttgagccaatgcaagaaaaggcggtatccaggttgtctgatcctgaattacttgggcagtactttaattccggtgtcgtttatttagacttaaaaaaatgggctgacgcaaaactaacagaaaaagcgttgtctattcttatgagtaaagataatgtttataaataccctgatcaggatgttatgaatgtcttactgaaagggatgacattatttttgcctcgtgagtacaatacaatttatacaattaaaagtgaattaaaagacaaaacacatcaaaactataaaaagctgattacagaaagtactcttcttattcattatacaggtgcaactaaaccgtggcacaaatgggcaatttatccatcggtaaaatactataaaatagctttagaaaattccccctggaaagatgactctccacgagatgcgaaatcaattattgaatttaaaaaaagatataaacatcttttagtgcaacatcattatatctcaggaattatagcaggagtctgttatctttgccgaaaatattaccgtaaataacatttaactggtttattatgattcagaagagcaagatcaaagacttggttgtttttaccgatgaaaacaattcaaagtacctcaatgtattaaatgacttcttgtcttataatataaatatcatcaaggtttttcgttctattgatgatacaaaagttatgcttattgataccgattacggtaaattgattcttaaggttttttctccgaaagttaagcgtaacgaacgtttctttaagtctctgttaaaaggtgattattacgaacgcctttttgagcaaacccaaaaagtacgaaatgaagggttaaatacactcaatgacttttatttattggctgaacggaaaaccttacgttttgtccatacttatatcatgatcatcgagtatattgatggcatagagttgtgtgatatgcccgatattgatgatgcgctaaaaaataaaattcagcaatcaattaatgccttacatcaacatggcatggtttctggcgacccccatcgtggtaacttcattataaaaaatggtgaggttcgaattatcgatctctccggaaagcgtgcttcagcgcagcgtaaagcgaaagatcgtattgacttagagcgtcattacggtattaaaaatgagattagagatctaggctattatcttttagtatatcgtaaaaaaatgcgcaattttatgcggcgtttgaaagggaaaccagcgcgctaaaaaaaatcccacaattacatgtcttcaccaggacagttttaagcggagttatttatttcacaggtttatcatgaagaatattagatacattgacaaaaaagatgttgaaaacctgattgaaaataaaatatctgatgatgttattatttttctttcgggccctacatcgcaaaaaacacctttgtcagtattacgaacaaaggatattattgctgtcaatggttctgcgcaatatctgttaagtaataatatcgttccttttatatatgtacttacagatgtccgatttttacatcagcgtcgtgatgatttttataaatttagccagagaagtcgttataccatagtaaacgttgacgtttatgaacacgcttccaaagaagataaactttatatcctccagaactgcctcgtattacggtccttttaccgtcgggaaaaaggtggttttataaagaagattaaatttaatattttgagacagattcacaaagaactgctgatctctgtaccgttgtctaaaaaaggtcgtctggttggattttgcaaggacattagtcttggttattgctcatgccatactattgcctttgctgcaattcaaatcgcatattcacttaagtatgcgcggattatttgttctggtcttgatttaacgggtagctgttctcgtttctatgatgagaataaaaatcccatgccctcggaattaagtagggatttattcaaaatattgccattttttcgttttatgcatgataatgtaaaagatattaatatttataatttatcagatgatacagctatttcttacgatgtaattccatttattaaacttcaagacatcagtgcagaagaatcaaaagatatgacaagaaaaaaaatgcaatatagaacttcaaccgattcttatgctaattaatcatcctgaaactaaaataatatggtataaaaatgcgcttaggaacttttcacaaaaagaaaagattttatataaacaaaatcaagattaatttcctttcttttttatttcgtaataaaataaataatcaaattacagatccagcacaagttaaatcatgccttattattcatgataataataaacttggtgatctaattgtattaagttcgatttatcgtgaactttatagtaaaggggttaaaataactcttctcacaaatagaaagggtggggaatttctctctaataataaaaatatatttgagttctgtattaaagaatcaaccggttttcttgaaatgcttactctatgtaagcatctgcgggatttacagttcgatattgtattagacccctttgaaactatgccctcatttaagcatagcttaatattatcaagtttaaaagattcttacattctgggttttgatcattggtataagcgttactattcattttaccatccccacgatgaatgtttaaaagaacatatgagtacacgagcaatagaaatactgaagcatatttatggtgagggtaaattttccaccaactacgacttgcatttaccagtagatgttgaagataaaataaaagaatttattggagatacaagaatagtcattattaatccattaggtgcaaaaaaaatatgccgtcttacgtttgagcaaataaaagttatatatcaagaagtgaaaacacactttgaaaattatcggattatatttaccgggttaccgcaagatttattgacaataccaatacttgaaatcgaaacactaccatttgatgagtttatttataccgttgcgttgaccaagtatagtgattttgtcatttctgttgatacagctcttgttcatatcgctgcggcttatcataaaccaacgcttgcattttaccctaattcacgtactccggaatatccctcgcatttaatttggtccccgaatcatcataaatctatacaaatagtatccccaacatatacggtaaaagatatcgatactgaaactttaactaattcagtaaagagattaagttgtatagataagaagtgagttttaactcacttcttaaacttgtttattcttaattaattgtattgttacgattattaatgacgagtaagaggactatagcggatataatgataattggaatgctgcgtgcccatatgatcacatcactgagtccaatccccacaatgccaagcgttaatatcaacaaacccaaagctcgttttttatatgctatataaaatagtgaaaaatagaggaaaagtgtggaaaaaattcccatcagacctttcagtgaccctgcttcaattatctcattatgtagatgtacgttagaaaactccaatgcccctcttagcctattgtgttctgcaactaacaaattcatactttcagcgcgtgactctgctgatctaaatgaaaaaggtgactttatgaatatatttaaaccaatttcgtacattgccagtcttgcacctagggaagtaacactattagcattggtataactgtttaagtcatttaatgcttcattatagcgattctgtattggtttattaaatataataacaatgctagctaatatagcaattagtagaacaatagaggaagtgaatttcttgggtgatttattataataagctattaatgcagcaacacaaattatagggaacaggagtagggttgctctggtttgtgttagcgccagaacataaagtaccgcgcaactatttaataaaaataaaaaaggatgatttttcttagtataaagaatcgcaacgccactaactatccctattagcattgttgaatatgctgctcctgttgccgttcctacaccaaaagaaatgcggtcattttcatgaatgctattaatatacattgcatatccagcaattagaaatgacagagaatacaaagtgtataatacactctctttttttgattttagctggctagttagtgtcaagaaaacaataaaagaaccaaatataaatattttggcagtatttaaataactatggtaagtagcacgaaatggcgaattatctactttaaacgcagaataccaaattaaatcaagcaagcctattaaaaatatagaaaggggaagaataaggttttttatattataattttcttgtctgccacgtaaaattagtgacaataagcaaactatagcagtgatattatatatttttatgctgaaagtattatcgacgaatgcaattatcattgaaaaaaaacataatatataagttattatctctaaaatcattgatgatttcagagtgtaaggtttcaatgaatgaagtttaaaggatgttagcatgttttacctttataatgatgataacttttccaaaactgcttgactgttgaggttaattaaattttctcttggagccctacataccatctgattcttcccatacccaccaattaatcccggatcggttggtccataaaccgtgatattgggtctatccagtgccgccgttaaatggcttaaccccgtatccaccgacactacaaatttagccccggccagcacgcgggcaacgccttccagactcatcttcggcaatacttcaacataagcaaatccttccgccagtcgtttcgcccgttcttcctcatgcggcgcgccccacggaagtttaatccgtattcctgaatcagccagtaaaccaatcaattctcgccagtgttcttccggccagtgtttatcatcacgggtcgtcgcatgaagaaatacggcatattcgccagcatctgtaggcaggttcgtcagaaaatgctgtgcgatagcataatcgccctgggtttgcggtttgctatagcccaaacttttggcaaacagttcgcgggtgcgttctacggcgtgctgctgttttgcaatatgatgcttacgattgtaaaacaggctggctaaaggttcgcgagcggtttgccagtccatgccatgctttacgccatgcgccagacgcgtcaccagcgccgcgctttttaccagcccctgagcgtcgataactgcgtcatagttctctgcttgtagcgcttcacgaaacgctttgcgttccgcttttatgggggccgagaaccaggctttacgccagcgacgtattgccacaggaataactcgctcaacggcagcgtgccaggaaggaatctgtgcgaacccttcttccaccacccagtcaaacttaatccctgggattgcctgctgggcatcagtgagtgcgggcaacgtatggagaacatcgcccatcgacgatgttttaacgatcaaaacccgcatccgtcaggcttcctcttgtaacaatagcgcgttgagttcttccagtacgcgctggggagtaatgtcgattaagctctggtgataaccctccgcagcgtcacctttacgcactttgtgatagccggtaatcaaacggatcacgcgcgctttatgggatagcggcggtgtgaagtccgggctactcggaccatacagggcaaccagcggacgattgagcgccgccgcaacatgcatcaggccagaatcgttagtgacaatggctttacaggctgcaatcaggataaccgcttgatcaagctgtgtttcccccgccaggttccgacaccatgcctgctgctcggtattcaaagcggcaagaatctcattgcccgcttcatgatctttcgccgagccaaacagaaccacctgataaccttcatcaatcagctgctttgccagctccgcatagtggtagtgtggccagcgttttgccggaccaaactccgcacccgggcaaaaaccaatcatcggacgttctgatgaaagcgaaaattgattacaggtatatgatttttcaccttcgctcacctgcaactgcggccataacaatggctgcggcagatcttgtgctgtgcgcataatgcctttgtcataggccagcgctatatagcgttccaccattagcggccaggcttctttatcgagcacgcgtacatcgttgagtaaaccgtagcgcatctcgccgcgccagccggtgcgatgaggaatacccgcgaagaaaggcactaatgcagatttgaaggagttgggtaagacgtaggcgcggtcgtagcgcttttcacgcaggctatgacccagtttgcggcgttcgccgatttccagcgctccgtgaccgagaggcataggaatagcttcgttaacttccggcatccgcgataataatggacggcaccatgccggtgccatcacatcgattatcgcctggggatagcgcgcctggagcgtgcgatagagactttgcgacatcatcatgtcgccaacccaagacgggccgatcaccagtattttcatgcagagctcttatgcgtcgcgattcagccaggccatgtattccgttacaccttcagcaacggttttgaacggtttgtcgtaacccgccgcgcgcagatttgtcagatctgcctgagtgaacgcctgatagcggcctttcagtttatccgggaacggaatgtattcgatctggcctttcttgtgataagccagcgtagcatcagctaccgcctggaaggattccgcacgaccagtaccgagattgaagatgccggaaacgccattttccaggaaccacagattcacatcagccacgtcgcccacatagacgaagtcgcgtttgaagttctcgctaccttcaaacagcttcggtgattcaccgttgttaagctgggtgttgagatggaaagcgacgctcgccatgctgcctttatggccttcacgcggtccataaacgttgaaataacggaagccaacaatctgcgagttcgcttcaggcaggatttgacgaacatattcatcaaacaggaattttgagtaaccgtagacgttcaacggtttttcgtactcgcgggattcaataaagtcggaggtgcgtccgccgtaggtggctgcggaagaagcgtacaggaacgggatttcacgctccaggcagtagtgcagcagctccttggagtattgatagttgttatccatcatatacttgccgtcccactcggtggtggaagagcacgcgccttcgtggaaaatcgcttcgacatcgccgaactcttcgccagccataatctggatcaggaagtcttccttatccatatagtctgcgatattcagatccaccaggttcacaaacttggtgccgtctttcaggttgtccaccaccagaatatcggtgatgcctttatcattcagggctttaacgatgttgctgccgataaagcccgcgccgccggtaacgatgatcataactgtaaccttcgaattatggagtcagagacaatctcagacacgaatgtctgtaatcataccatcacatccgaatcccttcagccctttacatagaggtgcaaggatgctaattgcaacaaactagtttgggttttagctagtccttcatggcggatgttggttttgcatgtgaatagtgctttagtatcaatattccgatgtatgataaataacggaagcatttgaatggataatatacagtatacattctattaatatttatgatataattctttttttatattaatggtcttattagtaatgaaatcatccaccacaattatcactgcatattttgacattggtagaggggattggactgctaataaagggttccgtgaaaaactagctcgttcagttgatgtttattttagttactttgagcgtctggccgcacttgaaaatgagatgattattttcacttctcccgatttgaaaccaagggttgaagcgattcgcaacggaaaaccaacaacggttatcgttatcgatataaaaaagaaatttagatatatcagaagtcgtatcgaaaaaattcaaaaagatgagtcgtttacaaatagacttgagcctcgacaattaaaaaacccagagtactggtcaccagagtatgttttggtatgtaaccttaaggcctattttgtaaataaagctatcaacatgggcttagtgaaaacgcctcttgttgcgtggatagattttggctattgccataagccaaatgtaactcgaggattgaaaatttgggatttcccatttgatgaaagtaagatgcatcttttcactataaaaaaagggcttactgtcacatctcaacaacaggtttttgatttcatgattggcaatcatgtatatattattgggggcgcaattgttggttcacagcataaatggaaagaattctataaattagttctggaaagtcaaaaaataacactaaataataacattgtggacgatgaccagggcatttttgtcatgtgctattacaaacgccccgatctcttcaacctaaactatctggggagaggaaaatggttcgatttgtttcgctgcttcaggagtaacactttaggggcaaaaatgcaggcgctgagaattttcctttcaagaaaataggtttccctccattagtgggtagcgttttgataccaactgagataggaaaaatgatgctttggcatcattttttctttttatatcaatgcagtaaaatcaatcatcattatgcccagccaaaactgtacagtttttctactatctgtaggtgttgagagacatcaagttacacgttatttatcctgaattttgcagaagtgttaacgcgttatctcgtcgcgacctataagtttgggtaatatgtgctggaatttgccctgtctggagaatcgcaatgcgtggagaattttatcagcagttaaccaacgatctggaaaccgcacgggcggaagggttgtttaaagaagagcgcattattacgtctgcgcagcaagcagatatcactgtggctgatggaagccacgtcattaacttttgtgccaacaactatctcgggctggcgaatcatcctgatctgattgcggcggcaaaggcgggaatggattctcacggtttcggcatggcttcggtgcgttttatttgcggcactcaggacagccataaagagcttgaacaaaaactggcggccttcctggggatggaagatgcgattctctactcttcctgctttgatgctaacggtggcctgtttgaaacgcttctgggtgcggaagacgccattatctccgacgcactgaaccacgcgtctattattgatggtgtgcgtctgtgcaaagctaaacgctatcgctatgccaacaacgatatgcaggagctggaagcacgtctgaaagaagcgcgtgaagccggtgcgcgtcatgtgctgatcgccaccgatggtgtgttctcaatggacggcgtgattgccaacctgaagggcgtttgcgatctggcagataaatatgatgccctggtgatggtagacgactcccacgcggtcggttttgtcggtgaaaatggtcgtggttcccatgaatactgcgatgtgatgggccgggtcgatattatcaccggtacgcttggtaaagcgctgggcggggcttctggtggttataccgcggcgcgcaaagaagtggttgagtggctgcgccagcgttctcgtccgtacctgttctccaactcgctggcaccggccattgttgccgcgtccatcaaagtactggagatggtcgaagcgggcagcgaactgcgtgaccgtctgtgggcgaacgcgcgtcagttccgtgagcaaatgtcggcggcgggctttaccctggcgggagccgatcacgccattattccggtcatgcttggtgatgcggtagtggcgcagaaatttgcccgtgagctgcaaaaagagggcatttacgttaccggtttcttctatccggtcgttccgaaaggtcaggcgcgtattcgtacccagatgtctgcggcgcatacccctgagcaaattacgcgtgcagtagaagcatttacgcgtattggtaaacaactgggcgttatcgcctgaggatgtgagatgaaagcgttatccaaactgaaagcggaagagggcatctggatgaccgacgttcctgtaccggaactcgggcataacgatctgctgattaaaatccgtaaaacagccatctgcgggactgacgttcacatctataactgggatgagtggtcgcaaaaaaccatcccggtgccgatggtcgtgggccatgaatatgtcggtgaagtggtaggtattggtcaggaagtgaaaggcttcaagatcggcgatcgcgtttctggcgaaggccatatcacctgtggtcattgccgcaactgtcgtggtggtcgtacccatttgtgccgcaacacgataggcgttggtgttaatcgcccgggctgctttgccgaatatctggtgatcccggcattcaacgccttcaaaatccccgacaatatttccgatgacttagccgcaatttttgatcccttcggtaacgccgtgcataccgcgctgtcgtttgatctggtgggcgaagatgtgctggtttctggtgcaggcccgattggtattatggcagcggcggtggcgaaacacgttggtgcacgcaatgtggtgatcactgatgttaacgaataccgccttgagctggcgcgtaaaatgggtatcacccgtgcggttaacgtcgccaaagaaaatctcaatgacgtgatggcggagttaggcatgaccgaaggttttgatgtcggtctggaaatgtccggtgcgccgccagcgtttcgtaccatgcttgacaccatgaatcacggcggccgtattgcgatgctgggtattccgccgtctgatatgtctatcgactggaccaaagtgatctttaaaggcttgttcattaaaggtatttacggtcgtgagatgtttgaaacctggtacaagatggcggcgctgattcagtctggcctcgatctttcgccgatcattacccatcgtttctctatcgatgatttccagaagggctttgacgctatgcgttcgggccagtccgggaaagttattctgagctgggattaacacgaacaagggctggtattccagcccttttatctgaggataatctgttaaatatgtaaaatcctgtcagtgtaataaagagttcgtaattgtgctgatctcttatatagctgctctcattatctctctaccctgaagtgactctctcacctgtaaaaataatatctcacaggcttaatagtttcttaatacaaagcctgtaaaacgtcaggataacttcagaggtcgtcggtaatttatgatgaacagcaccaataaacttagtgttattattccgttatataatgcgggcgatgatttccgcacttgtatggaatctttaattacgcaaacctggactgctctggaaatcattattattaacgatggttcaacggataattctgttgaaatagcaaagtattacgcagaaaactatccgcacgttcgtttgttgcatcaggcgaatgctggcgcatcggtggcgcgtaatcgtgggattgaagtggcaacgggcaaatatgtcgcttttgtcgatgctgacgatgaagtctatcccaccatgtacgaaacgctgatgaccatggcgttagaggacgacctcgacgtggcgcagtgcaacgctgactggtgttttcgtgaaacgggagaaacctggcaatccatccccaccgatcgccttcgctcaaccggcgtattaaccggcccggactggctgcggatggggctttcttcgcgccgttggactcacgttgtctggatgggggtttatcgccgtgatgttattgttaaaaataacattaaatttattgccggattacatcatcaggatattgtctggacaacagaattcatgtttaacgcgctgcgtgcgcgatataccgagcaatcattatataaatattatctgcataatacgtcagtgagtcggttgcatagacaagggaataaaaaccttaattatcaacgtcactatattaagattacccgcctgctggagaaattaaatcgaaattatgccgacaaaattatgatttatccggaatttcatcagcaaataacttacgaggcattgcgtgtttgccatgcggtgcgcaaagagccggatattcttacccgccaacggatgattgccgagatatttacttccggtatgtataagcgcctgattaccaatgtgcgcagcgtgaaggtcggttaccaggcgttactgtggtctttccgcttatggcaatggcgcgacaaaacgcggtcgcaccatcgcattacgcgtagcgcctttaatttgcgctagcgttaaacttcgccgcttcgggctgtttgccccagccttgccactgatgctggaagtaaacgatcagcgtgctctggctgatgctttcgcttaatacttcaaagaagcgattagcataaacaggttctatcggtttcttcggtttgcacagcttcacgccacggaacggattacgcggtgcatcaggcacagcgtttttcggcggtgtagaagtatcaacctgcggttcattcagcaagctgctggctttcaccagcgtaatgtctggcggcaggttataaaccatctgttgcaacacgcgtaccgttgcagggtgaggatgcccaatggcaatggtcgaaccgttgcgacgcgccaggtcaattgcgcgattaaattgcacacggatgtccgcttcattttgcgaatcgtcgaggaataccttccgtttgatcaccttcacgccagtgccttgcgcggcgcgcatcgcctgggtattaccgatggttacgctgtcgaggaagtaaagattgtaacgctccagcgcctgcatcactttctgcataccaaacaggttagaggtcatcttgctgcccatgtggttgttgatccccacggcatagggcacgttattgaccgcactacgaataatgcgctcaatttcgtcgctgctcatctccgggcgtagcgtatttttctccagcggctgtttactcaacggtgccatcgggagatgaatcaacacttcgtgcccgctgttatgcgctttggtcgccatctctctggcgtgcggtgaatcgggtaatacagcgacggagatagcggaaggcatcgccagcacctggttttcgttgtgcgggcgatacccaaaatcatcaatgacgatggcaagtttgccagcaagtacgggggaggagagcgccaacagagcggcaaatgcaagaacgttacgacgaaatggaaacaaaacttatcttcccaaccacggctgtggattgaccgcctgaccctggcggcgaatttcgaaatagagtgaaggccgaccctgaccgccactgctgcccaccagtgcaatcggctggcccgcgcgaacctgcgaaccaacgctcaccagtgcgctctgattatagccgtaaagactcatgtcgcctttaccatgctcaaccaccaccaccagaccgtagccttgcagccagtcagccagaatcacccgaccgtcggcaatcgctttaacttcagtaccttcagaagcaccgataaccatacctttccagcgtaattcaccctgtagctgttcgccatagcgatgcagcgtcggcccgcgaaccggccagaatgcctgaccacgcggcgcgcccagaccaccggtacgggacatcagcgatttttcgctttcggtcggtttgtaggtggtgcctttgcgcgtcgcttctttctggcggtcgcgaaccgcctgggcctcacgtgcttctcgttctgcacgcgctttcgccgcggcttccgcacgggcaatgctgttacgcagacgggattcgttggcgcgcagctcgctcaactgttgctgaccttgctggatggaagactccagccctgccagcgtctttttacgctcgttcagcgcctgagtcagtttcgcctgttgggcgcgctgctcatataacagcgtttgttgctcgctctgtttctcttccagttcagcacgctgcatggcgacttcttcacgcgtttgcttcaactgggcaatggtttcttgtcgcgcctggttgagatagccgaaataagcctgtaaacgctgtccacgctggctttcttcaccgctgagaatcagctgaataccggtatgctcgccctgacggaatgcggcatccagttgtgcggcgaggctgcgctcctgggcggctttttgctgctccagtttggcaatcgacgcgttcatctcatcaatctgtttattgagttgattgagcgtgttttgcgtttcgcgcagcttacgggtggcttcagagatcgcttcttcctgctttttcaattgtgcgagcaggcttgcgcgttgttgttgcttttggcgtaccgcgcgctcttttgcggcgatgtcagcctgaatagatttgagttggtcacgctcatccgcgtgggcggaaaaggcgcacaacaatacgccagcgctaagaacgctggcgtagatgatgggcctgattgcaaacctgcgcggtttcacggcccgtgtcatggtattaatcgcctttcccctcatggggagggattattccacgatgaacagcggcttaccagtcatctcttgcgggatttccatacccatcagcgacaacatggtcggcgcgatgtcagaaagtttgccgccttcaaccgctttcacgttcttatcaccaacgtaaatcagcggaactggcaggttggtgtgtgccgtgtgtgcctgacccgttgccggatcgcgcatctgctcagcgttaccgtggtcagcggtgatcagcagttgtccacccacggactcaaccgctttcgcgacttcttccacgcagtgatccagcgcttcaaccgctttaaccgccgcttccatcaccccggtgtgacctaccatgtcgccgttcggatagttacagatgatggtgtcgtatttgccgctcttgatggccgcaaccagtttttcggtcagctctgcggagctcatttccggttgcagatcgtaggtagccactttcggtgagttgatcagaatgcgatcttcgcctttgaacgactcttctacgccaccgttgaagaagaaagtaacgtgggcatatttttcggtttcggaaatacgcaactgagttttgtcgtttttcgccatccactcgccgaaggtgttaaccagggaagcgggtgggtaagcaaccgcagttttgatgtcagcggcgtattcggtcagcatcacgaaatcgacgttaaccactttcttacgcgcgaagccatcgaaatcagcgttcacgaaagcacgagtgatttcacgcgcgcggtcagcacggaagttcatgaaaatcagtgcatcgccgtcttccattgccgcgtctggctgaccttcagcacggataacggtcgctttcacgaattcatcattttcgtcgcgagcataagcagcctgcaaaccagcaacggcggtatcggcctggaactcgccctgcgccagagtcagcaggtcataagctttttctacgcgatcccaacggttatcgcggtccatcgcgtagtaacgaccaatgatggacgctacgcggcctttgcccagcgcggcaaatttttcttcgaattttttcagcgaggattcagcactgcgcggcggagtgtcgcgaccgtcaaggaatgcgtgcaggtagattttttctgcgccgcgttcagctgccagttctaccatcgccatgatgtgatcttcgtggctgtgtacgccgcctgcggagagcagacccataatgtgtaccgctttgcctgcgtttttcgctttatctaccgcgccagtcagcaccggattagcaaagaaagcgcgatctttgatttcaacgtccagacgagtcaggtcctgatacacgatgcggccggcacccaggttaacgtggcctacttcggagttacccatctgacggtcaggcagaccgacttccagaccggaagcgtcgattagggtatgcggacgattggcccacagtgcatccattaccggggttttagcactaaaaatggcgttatcctgctgttcttcgcgatagccatagccatccagaatcaccagtaccataggttttttagaaaccaacattgcgacaacctcatactcaagagtcaaaatttgcgtaattttactacagctgaatcgataaaatagcctctgaagatcaaaatatacgaccgctcgcggcaagccgatgccagatttacgcttttttttcgtcgcgccccgcaaaattgcattccagttaacgcgctggctgtatttgccgcaccgcgcaggtatactcctttcctggtttttttaatcactacgtcgggagttgttaccccccatgcaagaaattatgcaatttgttggccgtcatcccatactgagtatcgcctggatcgcgttactggtggcggttcttgtgactacgtttaagagcctgacctcgaaagtgaaggtgattactcgtggtgaagctacgcgtctgatcaacaaagaagacgctgtggttgtggatttacgtcagcgtgatgacttccgtaaaggccatatcgcaggttctattaatctgttgccgagcgaaatcaaagccaacaatgttggtgagcttgagaagcacaaagacaaaccggttatcgtggtagacggttctggcatgcagtgccaggagcctgcaaacgcactgacgaaagctggttttgcgcaagtattcgtgctgaaagaaggcgtcgctggctgggctggcgaaaacttgcctttggtgcgcggcaaataatttacctgtcgtctttcatgatgcaggccgttagctgcaattaggcccccagcgacttattgttataagcttctggggacactccattttgctgccgccctgcaacatgaaatttcagggtaaaaaaacaggagctaatttatggccaatgttgaaatctataccaaagaaacctgcccgtattgccatcgtgcaaaagcactgctgagcagcaagggcgtgagtttccaggagctgccgatcgatggcaacgccgccaagcgtgaagagatgatcaaacgcagcggtcgcaccacggttccccagatttttattgacgcacagcacattggcggctgtgatgacttgtatgcattggatgcacgtggtggactggatcccctgctgaaataacgtgtgaacgttggcattacattgcgcagtatttaaggacaacacttaagggttttctacacatgtcagaacaaaacaacactgaaatgactttccagatccaacgtatttataccaaggatatctctttcgaagcgccgaacgcgccgcacgttttccagaaagattggcaaccagaagttaaacttgatctggatacggcatcttcccaactggcagatgacgtatacgaagtggtactgcgtgttaccgtaacggcctctttgggcgaagaaaccgcgttcctgtgtgaagttcagcagggcggtattttctccatcgcgggtatcgaaggcacccagatggcgcattgcctgggagcatactgcccgaacattctgttcccgtatgctcgtgagtgcatcaccagcatggtatcccgcggtacattcccgcaactgaaccttgcgccggttaacttcgatgcgctgttcatgaactatttgcagcagcaggctggcgaaggtactgaagaacatcaggatgcctgatgaaccaacgtaatgcttcaatgactgtgatcggtgccggctcgtacggcaccgctcttgccatcaccctggcaagaaatggccacgaggttgtcctctggggccatgaccctgaacatatcgcaacgcttgaacgcgaccgctgtaacgccgcgtttctccccgatgtgccttttcccgatacgctccatcttgaaagcgatctcgccactgcgctggcagccagccgtaatattctcgtcgtcgtacccagccatgtctttggtgaagtgctgcgccagattaaaccactgatgcgtcctgatgcgcgtctggtgtgggcgaccaaagggctggaagcggaaaccggacgtctgttacaggacgtggcgcgtgaggccttaggcgatcaaattccgctggcggttatctctggcccaacgtttgcgaaagaactggcggcaggtttaccgacagctatttcgctggcctcgaccgatcagacctttgccgatgatctccagcagctgctgcactgcggcaaaagtttccgcgtttacagcaatccggatttcattggcgtgcagcttggcggcgcggtgaaaaacgttattgccattggtgcggggatgtccgacggtatcggttttggtgcgaatgcgcgtacggcgctgatcacccgtgggctggctgaaatgtcgcgtcttggtgcggcgctgggtgccgaccctgccacctttatgggcatggcggggcttggcgatctggtgcttacctgtaccgacaaccagtcgcgtaaccgccgttttggcatgatgctcggtcagggcatggatgtacaaagcgcgcaggagaagattggtcaggtggtggaaggctaccgcaatacgaaagaagtccgcgaactggcgcatcgcttcggcgttgaaatgccaataaccgaggaaatttatcaagtattatattgcggaaaaaacgcgcgcgaggcagcattgactttactaggtcgtgcacgcaaggacgagcgcagcagccactaaccccagggaacctttgttaccgctatgacccggcccgcgcagaacgggccggtcattatctcatcgtgtggagtaagcaatgtcgtgtgaagaactggaaattgtctggaacaatattaaagccgaagccagaacgctggcggactgtgagccaatgctggccagtttttaccacgcgacgctactcaagcacgaaaaccttggcagtgcactgagctacatgctggcgaacaagctgtcatcgccaattatgcctgctattgctatccgtgaagtggtggaagaagcctacgccgctgacccggaaatgatcgcctctgcggcctgtgatattcaggcggtgcgtacccgcgacccggcagtcgataaatactcaaccccgttgttatacctgaagggttttcatgccttgcaggcctatcgcatcggtcactggttgtggaatcaggggcgtcgcgcactggcaatctttctgcaaaaccaggtttctgtgacgttccaggtcgatattcacccggcagcaaaaattggtcgcggtatcatgcttgaccacgcgacaggcatcgtcgttggtgaaacggcggtgattgaaaacgacgtatcgattctgcaatctgtgacgcttggcggtacgggtaaatctggtggtgaccgtcacccgaaaattcgtgaaggtgtgatgattggcgcgggcgcgaaaatcctcggcaatattgaagttgggcgcggcgcgaagattggcgcaggttccgtggtgctgcaaccggtgccgccgcataccaccgccgctggcgttccggctcgtattgtcggtaaaccagacagcgataagccatcaatggatatggaccagcatttcaacggtattaaccatacatttgagtatggggatgggatctaatgtcctgtgatcgtgccggatgcgatgtaatcatctatccggcctacagtaactaatctctcaataccgctcccggataccccaactgccgccaggcttcatacaccactaccgacaccgcattggacagattcatgctgcggctgtccggcaccatcggaatgcgaattttttgttcagcgggcagggcatcaagaatgctcgctggcaggccgcgtgtttccgggccgaacatcagataatcgccatcctgatagcttacggcgctgtgagcaggtgtacctttcgtggtgagggcgaacaggcgctggggattttctgcttcgaggaacgcgcgatagtcatgatgacgcgtaacggcggtaaactcgtgatagtccagccccgcgcggcgcaggcgcttatcgtcccaggcaaatcccatcggttcgatgatatgcagacgaaagccggtattagcgcaaagacggatgatgttgccagtatttggcggaatttctggttcgtaaagtacgatgtttagcatactgcccccttagtgcgggggcaggatagcagaaaattggtgagcagtgcggccttttcccctcaccccggccctctccccggaggggcgagggagaaaaaaagagtgcggtgtcgtttcagagtgagggagtacatacagcgccgaacggtcccctctccctgagggagagggttagggtgagggggcgcaaacgactatgccgcattccctttcgccatgggagccagtgccgcaggcaactctttacccagcccctgcaccagcgaatcttgcgtaatttcgctgatcgatttcgcgccagtcagcgtcatcgccactttcatctctttttcgatcagatttagcaggttagctacacccgcctggcccgctgttgccagcgcatacaagaaagcacgacccagcagtacggtgtcggcaccgagcgcaatcatacgcacgacatcaagcccgttacgaattccgctatccgccagaatggctatatcacctttcaccgcatctgcaatagcaggcagtgcacgggcggaagagagtacaccgtccagctggcggccaccgtggttagaaaccacaattccatcagcaccaaaacgtactgcatcgcgcgcatcttccggatcgaggatccctttgatcaccatcgggccatcccagaaatcgcggatccattcaaggtctttccatgagatggacggatcgaagttattccccagccagccgatgtaatcttccagtccggtcggtttgccgagataagctgagatattacctaaatcatgtggacgaccgttcaggcccacatcccacgcccattgcggatgtgtcaccgcttgcaagtagcggcgcattgccgcgttcgggccgctcatacctgaatgcgcatcacggtagcgtgcgcccggtgtcggcatatccacggtgaaaaccagcgtcgaacaacccgctgcttttgctcgctccagcgcgttacgcataaagccgcgatcgcgcagtacataaagctggaaccacattgggcgcttgatggctggcgcgacttcttcaatcgggcaaacggaaaccgtcgagagagtaaacggaataccatgcgcgtccgccgctttggctgcctgaacttcgccacgacgcgcatacatgccacacaaacccaccggagccagtgccaccggcatcgacaatttctcattaaacagcgtcgtttccaggcttaagtcggacatgtttttcagaatacgctggcgcagcgccacttctgacaaatcttccacgttgcggcgcagcgtgtattcagaatatgcaccaccatccatatagtggaacaggaacggcggcagaatgcgttgcgctgcggcgcgataatcgctggctgcggaaataatcatgcgtttttctccctcgaatgctcattatgctcaccgggcaggcgggtaatccgtgcgtggcgagcctgatcttcatcgaatcgtttcatggtggtgtgaacaaaactaaggtgcgccatcattgctttacgcgccccgtcagcatcaccggcaaaaatggcgtcaatgacagcctgatgttgttcggtcagttgtgaaaaaaccggtggcaccagatacatccgctgacggctatgcttcactgaggattgcaggacatcgaagaaaccgcgcatggtttgcagcagcacgatgttatgtgaggcttcggcaatcgccagatgaaaacgaacgtccgcttgtgaggcgatatccgggtcttcacttagcgttgcttcaaagcaaagctgaatcttttctttgtcgccaggtgtggcgcgcattgccgcatgccatgcggtgctggcttcaatggcgtagcgggcttccagaatatcgaaactgtaatccggatcatcggccatcagtgtttttagcggctggacgatgttttgctccgaccatgtgtcatgacgccagcgaataaacgtcccgccgccgcgtcgactgagcagcacgccttcactcaccagttttgccagcgcctcgcgcagtgaattacgtgatacgccgagttgcatcgccagttggcgctcagcgggcaacttcatgcccgcttccaggtttttttcatcaatcagcgcccgcacacgatcggcaacctcgtctgacaggcgtctgggtaaaacaatcattaaggaatcatccacgttaagacataagcctgaagcgtggtgatcacgcccactatacaggtgaagatcaggctgtgtttgacagtaaagcggaacaaatcagactctttgcccaccaggcctaccgccgcacaggcgatagcgatagattgcggggagatcatcttaccggtgacgccaccggtggtattggcggcaaccagcaacagatcagagacgccaatttgttgtgctgcggtggcttgcagcgcggcgaacagggcgttagatgaggtatccgacccggtcaggaatacccccagccagccgaggaacggcgagaagaaggtgaatgcatgaccggtgtgcgccagtgccagcgccagtgttgatgacagtccggaatagttcgaaataaaggcgaatgccagcaccataccgatggagtagatgggcagagccagttctttcagcgtgctgccgaaggtgctgatagcgtcagacggtttcatcttcagccagacaatcgagagcagtgcagcaaacagaatggcggtgccggtggcagagaaccagtcaaacttaaacacggcggcataggctgtagcctcgctgaccactggcggcatacgggcaaccagtttatcgaggtacggcaccggaatattgatcacccactcatacagcgcgccacccgatgcgaacagggctttaaacggcgggatactccacagtgttacggtagctgtcaggaacaggaacggtgtccaggcacgtaacacctgacccgcagtgtaaccggtgtgggccagcgtcatatcaacctgtgacgcccccaaatcaccaaaacggaatacacgcactggctgccagcgtttgaggaacagcgtcaggcagagcagtgataccagcgaagagataatgtccggcagctccggcccaatgaagttagagctaaggtactgagcgatggcaaacgagccgcccgcaaccacgaccgcaggccacgtctctttgataccgcgccagccgtccataatcgccatgatccagaacagcacgataatggtcataaacggtagctgccgccccaccatctgaccaatctcaaagctgtcgatacctgttacctgtccggcaaccaggattggaatgcccatcgcaccaaatgccactggcgcggtgttaacaatcaggcacagcccggcggcgtacagcggtttaaaacccaggccgaccagcaatgcggcggtaattgctaccggtgcgccaaagcctgcggctccttcaaggaacgcgccgaaacagaaaccgacgatcagcatttgcagacgctggtcaggggttatcgaaagaatagacgagcgaatgatgtcaaactgcccggttttcaccgagatcttatagacgaacaccgctgcaataatgatccacgcgatgggccacaacccgtagaagaaaccataaaccaccgaggccagcgcgttagcgaccggcattttatagaacagcaaagccacggcaagggcgattgccaccgtccacgaggcggcgacgtatcctttcagtttgagcttaatcagcgcaaagaagaaaaacaggatgggaagcgatgctatcagactggaaagccagatattcccggcgggatcgtagttttgttgccagagattcattgcaggtctcctggagtccacgcacatcgtgtaatgagtctgttgctcatctccttgtcacacgttgtgtaaaagtggcactgccaattgtgttgtgtagggataatgacaatgaatggttaactaaatgttatgtattggcaacattgatgtgagttttaattgggaaattgtgaaccagaggtcagataagcgaagaattggtagggccaattcttgtggggggagatgtctggtaaagaaaagggcaatcctcatcagagaattgcccttaggttgttgatccagagcgccttatcttgccggatgcggcgtgaacaccttactcggcctataggaatgtgcagaatcaccctgtagatactgtgttcttaaaacgcggtctttgaaaacccagtcatctcctgcaggcccatttcgcggcccagtgcggtcattgggtgcacaacgaccagtccgcgaacacttttcttcagcttgcccatatcagcctgctcttttttggtaattgcgcgctggaatggcatcttcatcagcttctgtgcttctttactcagtttttggctatgaacttcacgcaggcgagcaatttctgcttccagcgtggctttctctttttccagctcggcatatttgtctgcggcttcaaccagcgaaagatcggcctgctggtggcggatggcgtccaggcgatcgctgaggcgtttgatttcgtttttttcgacttctttcatgtgatggcttctgataaagataaatttatagcccctagtatgcgcgaccaggtgctttgttcacaactaatgacattgtaatagttctgtaacgtaatcattaacatgctcaaaaactgcgcaattcgttgattaattaagaaatctatagaaaaaagataataaacagcagcggatgattattgaggattcagcacgttttccttaatgtcatctttaccgggaacctaaactaaaattggcggccgcgcattcccggcgcggggtaatacggagatatcatcatgggcaaattaggtgaaaacgttccgcttcttatcgataaagccgtagatttcatggcatcaagccaggcgttccgggagtatctgaaaaaacttcctccccgtaacgcgattccgtccggaatacccgatgaaagcgtgccgttatatctacaacgtctggagtattatcgtcggctttatcggccgaagcaggtagaggggcagtaagcagacgttgcttacttttgaaaggctttttttaagctgattttggaaatcagctcagtcagtgaaaggaccattgttgatcgcacagcctgttgatagcgctgaatttgcattgcatacaaactggagtctgctggttcaaactgtggcggcggtggtaacgccgccacgcagtgcagttcaccaaagggtccaaggatttcgtcgtcggtaaaggcgtactcgttgccgtcgtgatttagctcttcacgcaatgccatcagcagttccgcatcttcgtattcctggcggttaatgacgcccaacccgtaaatgagttttaaacgcacagaaagatcgcccagcggaccatcgccgtcgagtaacggttctacagcatacttcaccgcgtaatcgtctttgcggaatacctgaagcaccagaagatttaccgcctcggtcaggagctcgacggcggtgatcagaaagcttcgcacggttttgccagcattcagacgctcaagcacacggttttcaaaggcctgggtttgttccattgttgcctgcatatctgacaatctgttattcgggcgcagggtgtcctgcgcctggtccaccattattgcattgctttataagcggttaccgcctcggatacaacctcgctgttggcatcaagaccggaaatctgtgccagcgccgcctgcggacctttgtcagcgatcagtgctgccagttcctgagcctgcggatcatcttcactgcggaagtgcattgcagcggcaataccttcaatcaggtttttatgtggcagaccatattccagcgtaccgagcagtggcttgatcagacggtcgccagcactcagtttacgcagtggctgacggcctacgcgctctacatcatctttcagatacgggttctcaaaacggccgagaattttctggatgtacgccgcatgcttgtcagcgtcaaagccgtagcgcttgatcaatactgcaccactttcttccatcgcaccttttaccaccgcgcggattttctcgtcgagaatcgcgtcacgaatggtctgatgaccggccagttttccgaggtacgcggttatagcatgacccgtgttcagggtgaagagtttacgttcgacaaatgccatcaggttgtcggttaactccatgcctgggatgttcggcagtgcgcctttgaactgcgttttatcgacaatccattcgctgaaggtttctaccgtcacttccagcggatcgttagttgccgaagccgaaggcggtacgatgcggtcaacggcggaatcgacaaagccaacgtgttcttctacccacgctttggcgtcttccggcagggcgttcatcacatggcctttcagctgcgtggtaccgcgtaccatgttttcacaggcgatgatgttcagcggggattcattaccttgttctttacgtttcacctgccctttggcgattgccggagcaatacgttccagcacaaccgggccaacggcggtagtgactaaatcaacctgagcaatcagatcaacgacatcatcaccaatgctgctgacagcattgacgccggaaacggtatctacctgctcggtttcaccaaccacatgtacctgatagctatgacgggcattcagggcatcaagtaccacctgattgacatcggcaaacgtcagttggatacccgcgtctgccagcagtttaccgataaagccacgaccgatattacctgcgccaaaatgtaatgctttcatagtattaaccttcatcaatgtttttacccgagagggctggggtgaggcttttccctcacccaaaccctctccgtgaggagaggggcagcgccggatgcggcgtaagcgccttatccggcctacaagaacgtgcaaattcaacaaattgtgatgcatcctgtaggcctgataagcgtagcgcatcaggcaattaaccccaccttctccatgtggagagggtgggattggattacttacgacctgccagcagttccagcacttcatccacgctggtggtgtgtgccagacgctcgatgacggactcatcatccagtgcattggtcaggctggtgataacctgaatgtgctcgttgttacgggcagcaataccaatcaccagacgggcaatgtcatcttcttcttcaccgaagcgcacgccttccgggtactggcagaacacgacgcccgttttcagtacgcgatctttcgcttcaaccgtaccgtgtggcaccgcgatagactcacccagataagtcggggtcagtttttcacgatccagcatcgcctgaacgtattccggctcaacgtaaccgcctttcaccagctgctcgccagcaaaacgaatcgcttcttctttggttgccgctttgcgaccgaggaagatgttctccgcgcctagcttgaacaggttagcactggaatcgtcaaagctgtctttcaggctgtcttttactttctcttcgtttgccgtgtggcgttgggcagcaaccagacgttcggtcaggctggtgtacaggccgctgtcgaggaagttggtcagcgaaatatgctgtgcctgcggaacctggcgcatagcgcgttcggtcaggtcacggtgagtgatgacgaggtccacatctggcggcaggttgttgatcgcgctgttagtaacagaaatctgcgacagacctgcatcctgaattttcttacgcagaacgcctgcgcccatcgcactggaacccataccggcgtcacaggcaacgatgattttacgtacgtggctcaggtcgttagtcacatcgccagcagacagcggagatgcgcctttagactcagctttcatgtcctgcatacgacgagttgctgcttcaatatcatcttcttctttcactttgctggttttcagcaaaatagcagagacaacgaaggagacagccatcgccgcacacacacccgcgatgttagcgaagtaagcaccttttggtgtcatcgccagtacagcaaggatagaacccggagatgccggagaaaccagaccaccgcccaggatagtcagcgtgaacacgccagtcataccgccgaggatgactgcgaggatcagacgcggattcatcagcacatacgggaagtagatttcgtggataccccccaggaagtggatgattgccgcaccgcccgcagactgtttagcgctaccacgaccaaagaacatgtacgccagcagcacgcccatacctggacctgggttagcttcaatcaggaagaagattgatttacccagttcatgggactgctgaatacccagcggcgagaagataccgtggttaatggcgttgttgaggaacaggattttcgccggttcaacaaagatagacgccagcggcagcatgtcatggacaaccatgaagttaacgcccgcagccagcattttggacagggcttcaacaatcgggccaatgccgaggaatgccagaatagcgaggatcatcccgatgatgcctgcggagaagttattcaccagcatctcaaaaccggatttgatcttaccgtctacccagcggtcgaagtgcttaatgcaccagccgcccagcggacctgcaatcatagaaccgaggaacatcggcatgtctgcgccgacgataacgcccatggtggtgatggcaccgactacgccgccacgttcgccgcctaccagcttaccaccggtataaccgatcagcagcggcaggagataagtgatcatcggcccgaccagcttcgccagcgtctcgttcggtaaccaccctgttggaataaataacgcggtgatgataccccacgcgataaacgcgccgatatttggcatcaccatgttgctgaggaaacgaccaaagctttgcactttgatcttaatatcggatgacataaaaacaccccttcttatgtttgctgtcgcgcaggctggaagcccgaggttttttgttaatgtggcggcagaggtagccggaccttgtagatactgcgaaatctggcactgaatcggttaactgtccagtcgacggccttttgtgtgatatcaatcacataaatatagggggtagagaggtaattgacgtgacgttcatcacaaaacgcttgtgtaaaaaagcaacaaggcggcgattttcgctaaaaatggcatttaaatgtgagtagtgtcacatttttgttttgatggtttgttgaatctttgtgatctgaatcacaagatattttcttacggcgttcacctgatgtgatctacagcatgttatgccttcgtcatacaatcgttatgtaactaagcaactcatcacctctaaaaattattctttggtgttatggcgagaatcgcgaacccggattattgtcaaaatatcagcctgactcccttctggctgccagcccaaaaacaacactgataaacgtgaatccgaggcagatatgtttctaaactatttcgcgttgggagtgctgatcttcgtctttctggtgattttttatggaatcatcgcgatacatgacatcccttatctgattgccaaaaagcgcaaccatccccatgccgacgctattcatacggcgggctgggtgagcctgtttactctgcatgttatctggccgtttctgtggatctgggcgacgctctatcaaccggagcgtggctggggtatgcagtcacatgttgcgtcgcaggagaaagcgactgacccggaaatcgccgcactttctgaccgaatttcccggctggagcatcaactcgccgccgagaaaaagactgactattccacgttcccggagatctaattatggatctattgattgttttaacttacgtggcgctggcgtgggcggtctttaaaatcttccgcattccggtaaatcagtggacgctggcgacggcggcgctgggaggcgtgtttctggtgagtggtttgattttgttgatgaactacaaccacccttacacttttaccgcgcaaaaggcagtgatagcgatccctatcacgccacaggtgacgggaattgttactgaagtcactgacaagaataatcagcttattcaaaagggcgaggtgctttttaagctcgacccggttcgttaccaggcgcgagttgacagacttcaggctgacctgatgacggcgacgcataatataaagacgctgcgtgcgcagctcactgaagcgcaggccaacaccacccaggtttcagcggagcgcgaccgtctgtttaaaaattatcaacgttacttgaaaggcagccaggcggcggtgaatccgttctcggaacgtgacatcgacgatgcgcggcaaaatttcctcgcgcaggatgcgctggtgaaaggctcggtggcggagcaggcgcagatccagagccagctcgacagtatggttaacggcgagcaatcgcagattgtgagcttaagagcgcaacttactgaagcaaaatataaccttgagcagactgtcattcgcgcgccgagcaatggctacgttactcaggtactgatccgcccaggtacatacgcagctgccttgccgctgcgtccggtgatggtcttcatccccgagcaaaaacggcaaattgtcgcccaatttcggcaaaactcgctgttacgtctgaaacctggcgatgatgcggaagtggtgtttaacgcgctacctgggcaggtgtttcacggcaaactgactagtattttacctgtcgtgccaggcggttcttatcaggcgcagggggtattgcaatcattaacggtcgtgcccggcacggacggtgtgctgggaaccattgaactggaccctaacgatgatatcgatgccttacccgacggcatctacgcccaggtggcggtttactccgaccatttcagccatgtttcggtgatgcggaaagtgctgctaagaatgaccagctggatgcattatctttatttggatcattgagggggaggggggagattatggaactttgctccttgtaaggactaattatttttgcatattacttcattagcttcgatgatttttctttaatattcattatgttaataagttctggatgagtgtgctctcattggattttttatccgtcttgttctgccgcaggatgagactatacatcgtcgagatcgcaatgatgatatgagttgttcctcctgcgacggctctaatcaaaaaagagcaggagtgcttttccatctattgcgatgatggctttattatctgaaggatgacagtcacatttaaaaaatatttaatctatagatcacaatgtagggtcatggaatatatgtatacaactattttcttcttcacttttaattatcgtattcattataaaactaagttaaaaaaactcctggagagtgagttattaatatatttttaaataaaattaagttatcattcatcgatgcactttatagaatcatcaatggccataatagtactattaactctcaattttatatttttatcatcactacaaatattaactgaatttatatcaatgattttttttattcttatcttttattttatttactgtttcaatgcaatcagcggcaagttggagtggatttagatttttcagatatggtcttatgatctttcccttacttaataaatagcatgtataggattcggaaagtccagcatctattttgtacctcattatattagataaggatgtgagaaattccttgttatcattcgcagccatatatgccagtccgagttcagcctctgcggccttacaggcaaaatagcttagtgaacacgcttttcgtccctctttagtactggctgatattagtgcccataatattgctttgtctgccaaatctaactctctctgaaattgtcttgcagtaactgcactcgcagaaatagagaaaaaaatacaattgttaataaccttgccatattttttagtccgtaactgttaatgtgctatctggctctgaaaatattaactcatttaatttttgcatgtcattagataaaccagttatacaaccctcggaacagaatcgaggtcctaaagacggaccaaaagcgtttaaacaactatgtattgaaaatccattgcgattataagttcctgtattaactgacggtactaatcgtatgccgtcaggttttctattgcttgctcccgggtcattaacattccaactccataggccttgaggtattggccatctatttataaatgtgtacaacggggattatttttacattgcatattattaccagaagcgactggaatactaagcacatcataaaaattatcatcacatggtatatctgaaacacacgaaagcatacctaaagttatgctgtataaacaggtggctaatcccaaggggatcgattccagaaatcgggttcaacggatactgataaaaattccacctaccttccagcccaatcggagcctgagtgttataccgcccctgctgcggttaatgttaccgataatagttatagtacagccctgattcatcatcatactactgctgcggcagtctgatgaactattgcttttacggattctccttattcttccttctatccattcgctttagctttttgagctcttgaagtttgctctttgcatcaatattaccgttatttacagcgaattccatccaataaatagctctattcaaattataatattctgataatgttggatttgtatctgataaaaagaccccataattaaactgcgctgtaacattcccctgagatgctgatctttccaagaatcgcaattgtttgtaaatgttatttttagtaaagcagtaatattgatatagtcgaaatgatgcctctgaatcaccatgttgtgatttatacttcagtttcatcaacttttcttcacttaaatcataggtcattgctgtagaccccatcatactttcgttttgttttattttcacatcagcaccatgcaattgacaaataaaagagaaataaaaaaatagtaacaagcatgctttcatacatctacaacctatcttatatcactgggtttttctggcgtaccttgcatattagaaatggggtgcccagatggcccatatgttatccaattaccaaggtcttttgttgttatagccattagatccttatttgaattaaggttcgttggtgctgttagcactgtatccatttttaacttaccattagttcctcgcccccaccacgtccatagcgtgtcaggtcctattacatttgtatgtaactctttagctaattagctagcaaatgaattttgtcctttacctgtattacaagaaaataaccaaactgtcatcccatctttataattcccatcaaatttaattagatatgctagatctttagctgtcatgatactgcgcgttgcggattcaatagatgtgggggtaccatgccccccgattgtgaaaacgcctgggatattaatctcatcagctacagaatggataagatcactttcggggtataaatttatatcaaccaaaccttgcggatctacatttatgaccggattcaacggatactgataaaaattccatccccccttcagtccaatcggatcctgagtgatataccgccccagcagcgggtcataatagcggtggcggttgtaatacaggccggactcctcatcatactgctgacccggcaggcgaatgagctgctgcagatgatgcgggttctcatcactcagcaggttgccccattcatcatattctgcgcaccacgctgttgccccttccgtgctgatgagcgccagcggcaggccgcgatggtcgcagtggtacaggtggatttttcgcgccggcgtgtacaccgggtccatctggtttttcatctgctccacggtcaggccgcacgatgccagccagcggcggctttcctcactcacccggtcagccaggatttcactttccagccggtcgagcatctgcaccgtgccggcgggaatcccccactgtgcataggcaactcacgctatgaacgcttcagcttatcaatagcggaagttataatttcattgtcatcaaacttgtacaacatagtatctaaaacaggaagtagcgttttatcacctaattcacccgcagcttcaatgatatcatcataaacagtatttttttttaactcatcgcataaaacagataaaacccttttatcttttctgtaggaaagtccgattattgcttcaatacggacttcctcatttttatcctgaagcatctccacaaaacaatccctaatatcactattatcatatttattgatatttattgcaaatgcggcccagtttctgacatctccatttggatcttttaacagattaatcaatagtggaattgttgctttatcattgataacagaaatagcaaatgctgtagcacgtctgacattagtcgatttatcaaaagcagtaatttgagattgttctactattttaggtgaataaattgggtttttcttgcatcgctgagccgttgactcgattgccgtagctcgaacgcaagcgctcttatcattcaatgccatattgttcaaaatattaaaaacattatcttcgcattttttgcaaatttttatttgcccgagtataaatgctccgatatctctacggatataatttttatcagagcagaactcaattgccaatctaacagcgtcttgcccacctcttaactgtaatactctggcagatgaaatccttttcaaggaattgtgatcatcaagtaagcgaaataattcatcatcatttagtttcttacattgattatataaaccatactctttacttgcctttcttttctggtatgtatttgacattgcaggaacctccacaagggctatctttttttatcgtttgactgtctggagtgacgacaattccaggctttctgtgtgctttttgcatctttagcactaatatcaccacaatcaattagttcctgaagtacgtcacatctgtcgggttttttcccatcactccagaatctgtcatttattatgtcattgacacgatcagttatccctgtgtctgcaacatttccacgagaagctatcattgttatatctaatgctagtcccggattattcaatattagagagtcaaatattctttgtgatgctgtatcgttccaccattttgtcaatgcttttgcagcattatcatctgcttgctgctgtgcagggcttttgggccatggaattggcaaggggaatggtctaggaaaaacttctaaccccagaggatctgtattcgtaactggattcaacggatactgataaaaattccatccccccttcagcccaatcggatcctgagtgatataccgcccctgcagcgggtcataatagcggtggcggttgtaatacaggccggactcctcatcatactgctgccccggcaggcggataagctgctgcagctgatgcgggttctcttcattcagcaggttgccccattcatcgtattctgcgcaccattctgttgtcccttccttgctgataagggccagcggcaggccgcgatggtcgcagtggtacaggtggatttttcgcgccggcgtgtacaccgggtccatctggttttgcatctgctccacggtcaggccgcacgatgccagccagcggcggctttcctcactcacccggtcagccaggatttcactttccagccggtcgagcatctgcaccagcaccggcgggaacaccacactgccaccgtcttcgccgccggactgctgaagcgcatccgccaggctgcggcgctgcgttttcgccagctcaccggtggcggtttcaactctgatgagtggcgtgaagctccccggctgataaatcgtctggatgcgggttctgtcgttctgtattgtggtcagccggtcgccgtcccagccgtaccaggtcacttgcggtttccgtgacagcgacatccagcccgtcaggtcccgttcacgccgccacacccgttttgccaccctgcggcccagcgggtcgtaaagatagcgactttcgaccagcggctcttcatattgtgtccgcgtgtagtgcaccagccggtgctgactgtcgtaatggtaccggtgagtccgctcatcatccgtgcggataaccccttccgggatgaggtcggttttctctgtcagcctgccgtgacggtcataccggtaaagatagtgcgcgtcacgggcgatacggttatccggccacatgctgagggtgctgtccgggtgcagctccgggtcgggcaggcggttacctgccgggtctgtggcatacgggatgcggatatccagattcgctgcggtggtgtgaacgccggtcagcctgccggtggtgctgtagctgtaactccgggtctggcgcgggctgctgatgcggatgagttcgccgttgtcgttccaggtgtaatcgcggtcagacagcaggctgttcaggtgctggctctgtaactgcccggcaggggtataagcggtggtgagttcataacggccgaagctgcgcagcgtttcccggtgcaggcggtcgcgggtgtactccaccagcggtgtgtcgccgagtttcatgcctgccaggtaaccgctgccgtaggtcagccattccacggcgggcaggctgtccggtatacagcggttcgccagcccctgcgcgttgtacgcatgtctggtctcatgctgccagagcagtgcttccgtctgcgggtgatgcaccgtctgacgctcaccggtcagccggcctttctcatcatacctgtaatgcaccgccacccggtgcccttcgctgatatggctgatgtctgtcagccagccacgttcgtcatactgccaccgctctgcggtttcacccttcacggtgcggtgcgtgaggcggtctgcttcgtcatagtgccagtgggtgaccagaccctcatcctcgctgcggataagtttgccggtcaggtcgtggtgataacgctgtgtgcggccgtcaaagccggtttcctgtatcagccggtcaagtacatcgtaacggaaggtggtgtggctgccgttttcactggtcaggcggatgacccgtccggcagcatcgtattccatactgcgcgttagcccgccctgcgtggtacggacggcctttccccacgcatcgtactgtgtcccgtttctgctgccgtccggggcaatgacggcggtcaggtcaccggcgatgttgtattcataccgcgtttcatggccctgcgtgtctttcacggcaattaactgtccacggctgtcgtatgcgcggtactgactcagcccttcctcgcggtgcaccgccgtcatctgcccgaagcggtcatggtcataacgggttacataaccggaacagtcggtgaagctcagcaactgaccgtaacggctccacgtcatggttttccggctgccggtggcatcttccgttgcgcagggtaagtcactgtgtggattatcataacggtagcgggtgatatcgccgtcaggggcagtttcctgaatcagacggcccaattcatcatattcccggcgcaattccagcccgtcaggcccggtggctgacgttaactggttgtggtggttatagtaaaacgccgatgccctgccatccggcgtggttatgcgcgtgatgaggcccgtcaccacatccgggctgtactctgttgtcctgcctgcggcatccgtctgtgccctgagcctgcccacggcgtcaaactgactctgcgtgacgctgccgtccgcgtgttcctttttcaccacccgcttcagcccggcttcgccctgcgtgtgcagcacttcacggcggtccaggctgtcggtgatggtgatgcggtctttctcatactgatacgtgtagcttaagcctgccgggtttagctgttctgtcacccgcccgtcgctgtcgtaacggtaacggatttccggccggcccgtgtgacggtgcgccaccatccggccccggtatttatcatcgtaagtaaagctgcgcacctgtttgccactacggtcatacaccaccgccagttcgccgcgtggcgtccagccatagcgcaccagcggcgcggcaggtaaattctccgggtattccgggtcgtgcgtcagccacacggcagacagacggatgccgttgtcccggccatattcggtgtaacccggcagggtatcaggaaaagcggacggttccgtcccgccggaaatggcctgctgccgggcttcttctgcccgctgcgcctgcgtggtcagtaccagccggaagtgacgccaggcaccatccgtcacgccggtgatttcgccgctgaattcaccggcggcttcgcggtggaacgtctgtgtgcgcccgaagcggtccaccagcccggtcagtacccggtacggcggcagcggcgcaggcagcacctcatccgcttccggcacccgctcacaccaaccgagcagccaccacggcccctgcggactgtttgtcgccagataacgatgcggacttaagcggagttcttccggcagcgcctgccagagtgcggccagccggtgaccttcatccagtttcgccacgccgccgcgcaccagccacagtgactcgctgcggctgtaaccgtcctcaccgggaaacaggtgctcaaaatacaggcttctgccgccgttatcactgagtatcagtgtgttatcgcgcagctgtaagcggatatccgcaggcattttccagccggggccgaggctccccaccggcgcgggcgtttttgtccggtaactgctgtaggtgcgggagaggatgaacggcagcgggccgggcagggcgatgtcggtttcaccgggaaggacctttgcaccgagcaggggattgaccggatggccggacgtcactccgccggggcacaccgaacaggccacgccggtgggggcaccaatgcgcaccccggctgaaccctgaacaatgctaccgccatactgcgtcatgtcgccctgacgcgctgccggttttccgctcatttctcatccttgttttatcgggttatttgtctgctgacaggcgaaaccctacagatttataagaaagcctgaagtgagatatccatcagagtgaaataattaggaaaatatttatatcaccatgataaatatgtgatttatttggaagtaacaaaccatcaacattttctgccctttttcccatcaccaggccatactgatatttttcctcgcacaaaggactcggcatgaaactcgtcggtagctacaccagcccgtttgtacgcaaactttctattctgttgttagaaaagggcataactttcgaatttattaatgaactgccctataacgcggacaacggcgtggcgcaatttaacccgttaggaaaagtgccggtgctggtgaccgaagagggcgaatgctggtttgattcgccgatcatcgctgaatatattgaattaatgaatgtcgctccggcgatgttgccgcgcgatccgctggagtcgttgcgggtgcgcaaaattgaggcactggcggatggcattatggatgccgggctggtatcggtgcgtgaacaggcgcgtccagcggcgcagcagtctgaagatgaattgttacgccagcgggagaaaatcaaccgcagtctggatgtgctggaaggatatctggtcgatggcacactcaaaaccgatacggtcaatctggcgactatcgccattgcctgtgccgtcggatatctcaatttccgccgcgttgcgccaggttggtgtgtcgaccgcccacacttagtcaaactggtcgaaaacctgtttagccgcgaaagttttgctcgcaccgaaccgccaaaggcttgatgcgcgatatgtcctcctgacccatctcacgttacaatccgtggttatgttaaacgcccttctccgtgtgagagggccttgatcagccaggtttcctatgacaaccgaaacgcgttccctctatagtcaacttccggctattgatcgcttattgcgcgatagctccttcctttctttgcgtgatacttatggtcacacccgcgtggtggaattgttgcgtcagatgctcgacgaagcgcgagaagtgattcgtggcagccagacgctgcctgcgtggtgtgaaaactgggcgcaagaagtcgatgcccggttgacgaaagaagcgcagagcgcgctgcgtccggtgatcaacctgacgggaaccgtgctgcataccaaccttgggcgagctttacaggcggaagccgcggtggaagccgttgcgcaggctatgcgttcgccagtgaccctcgagtatgatctggacgacgccggacgcggacatcgcgatcgggcgctggcgcagctgctgtgccgtattacgggggcggaagatgcctgtatcgtcaataacaatgcggcggcggtgttattgatgttggcggccactgccagcggaaaagaggtggtggtatctcgcggcgaactggtggagattggcggcgcgtttcgtattcccgatgttatgcgtcaggcaggctgcaccctacacgaagtagggaccaccaaccgcacgcacgcgaatgattatcgtcaggcggtgaatgaaaataccgcactgttgatgaaagtacataccagtaactacagcattcaggggttcaccaaagcgatagatgaagcggaactggtggcgctcggcaaagagctggatgttcccgtagtgactgatttaggcagtggctcgctggtcgatcttagccagtacggtttgccgaaagagccaatgccgcaggagttgattgcggcgggcgtcagtctggtgagtttctccggcgacaagttgttaggcgggccgcaggcaggaattattgttggtaaaaaagagatgatcgcccgcctgcaaagccacccgctgaagcgtgcattacgcgcggataaaatgaccctcgcggcgctggaagccacgttgcgtctttatttacaccctgaagctctgagtgaaaaattaccgaccctgcgcctgcttacccgcagcgcagaggtcattcaaatccaggcacaacgtttacaggccccccttgccgcacattacggcgcggagtttgcggtacaggttatgccatgtctttcgcagattggcagtggttcgctgccggttgatcgcctgccgagcgcggcattaacgtttacaccccatgatggacgcggtagccaccttgagtcattagccgcccgctggcgtgaattgccagtgccggtgattggtcgtatttatgacggacgattgtggctggatttacgctgccttgaagatgagcaacggtttttggagatgttgttgaaatgattattgcgactgccggacacgttgaccacggcaaaacaaccttattgcaggcgattactggcgtaaatgctgaccgtctgccggaagaaaaaaagcgcggcatgaccatcgatctcggctatgcctactggccgcagccggatggtcgcgtgcctggttttatcgacgttcccggtcatgaaaagtttctttccaacatgctggcgggcgttggtggtatcgatcacgcgctgttggtggtggcgtgcgatgacggcgtgatggcacagacccgtgagcatctggcgattttgcagctgaccggtaacccgatgctgacagtggcgctgaccaaagccgatcgcgtggacgaagcgcgtgttgatgaggttgaacgccaggtaaaggaggttctgcgggaatacggttttgctgaggcaaaactgtttatcaccgcagcaaccgaaggtcggggaatggatgccctgcgcgagcatctgcttcagttgccggaacgcgagcacgccagccaacatagtttccgcctcgcgattgaccgcgcatttaccgtaaaaggtgccgggctggtcgtcaccggtacggcgttaagcggggaagtgaaggtaggcgattcactctggctgactggtgtaaataaaccgatgcgtgtacgtgcgctgcatgcgcaaaaccagccaacagaaaccgccaatgccgggcagcgtatcgcgcttaacatcgcgggtgatgcggaaaaagagcagattaaccgtggcgactggctgcttgccgatgtgccgccagagccgttcacacgggtgattgtcgagcttcaaacccatacaccgctgacccagtggcagccgctgcatattcaccacgccgccagccacgtcacgggacgcgtttcactgctggaagataaccttgctgaactggtcttcgacaccccgttatggctggcagataacgaccgcctggtattgcgcgatatctctgcccgcaacacgctggccggagcgcgcgtcgtgatgcttaacccgccgcgtcgcggtaaacgtaagccggaatatctgcaatggctggcgtctcttgcacgggcgcagagcgatgccgatgcgttatctgttcatctggaacgcggcgcggttaaccttgcggatttcgcctgggcgcgccagctcaacggcgaagggatgcgcgaattgctgcaacagcctggttatattcaggctggttatagcttgttgaatgcgccggttgccgcccgctggcagcggaaaattctcgacacattagcgacttatcatgagcaacatcgcgatgaacctggccctgggcgcgaacgtctgcgacgtatggcgttgccaatggaagatgaagcgctggtactgttgctgattgaaaagatgcgcgaaagcggcgacatccacagccatcacggctggctgcatctgccagatcacaaagcgggcttcagcgaagagcagcaggccatctggcaaaaagcagagccactgtttggtgacgaaccgtggtgggtgcgtgacctggcaaaagagacgggaaccgacgagcaggcaatgcgcctgactctacgccaggcggcgcagcaaggaataattaccgcgatcgttaaagatcgttattaccgtaacgatcggattgtcgagtttgccaatatgatccgcgatctcgatcaggagtgtggttcaacctgcgcggcggatttccgcgatcgcttaggcgtaggccgaaagctggcaattcagattctggaatattttgaccgcattggctttacgcgtcgtcgtggaaatgatcatttattgcgcgacgcattattatttccggaaaaataaggaaatgattaattaagttttaaaataaattaatacaaaattcttatgaatttaaaaaaagcacattgtttaatgaatacaatgtgctttttattagattaattttgataatcaataatactgatcatattttcgaatgaaaatcctcagtaagctgcccgcccttttttacactttcaggagtgtgttatggcagcttcaacgttctttattccttctgtgaatgtcatcggcgctgattcattgactgatgcaatgaatatgatggcagattatggatttacccgtaccttaattgtcactgacaatatgttaacgaaattaggtatggcgggcgatgtgcaaaaagcactggaagaacgcaatatttttagcgttatttatgatggcacccaacctaaccccaccacggaaaacgtcgccgcaggtttgaaattacttaaagagaataattgcgatagcgtgatctccttaggcggtggttctccacacgactgcgcaaaaggtattgcgctggtggcagccaatggcggcgatattcgcgattacgaaggcgttgaccgctctgcaaaaccgcagctgccgatgatcgccatcaataccacggcgggtacggcctctgaaatgacccgtttctgcatcatcactgacgaagcgcgtcatatcaaaatggcgattgttgataaacatgtcactccgctgctttctgtcaatgactcctctctgatgattggtatgccgaagtcactgaccgccgcaacgggtatggatgccttaacgcacgctatcgaagcatatgtttctattgccgccacgccgatcactgacgcttgtgcactgaaagccgtgaccatgattgccgaaaacctgccgttagccgttgaagatggcagtaatgcgaaagcgcgtgaagcaatggcttatgcccagttcctcgccggtatggcgttcaataatgcttctctgggttatgttcatgcgatggcgcaccagctgggcggtttctacaacctgccacacggtgtatgtaacgccgttttgctgccgcacgttcaggtattcaacagcaaagtcgccgctgcacgtctgcgtgactgtgccgctgcaatgggcgtgaacgtgacaggtaaaaacgacgcggaaggtgctgaagcctgcattaacgccatccgtgaactggcgaagaaagtggatatcccggcaggcctacgcgacctgaacgtgaaagaagaagatttcgcggtattggcgactaatgccctgaaagatgcctgtggctttactaacccgatccaggcaactcacgaagaaattgtggcgatttatcgcgcagcgatgtaatcatcatttccacaacggctggcaaattgttagccgctttttcaactatctctgtaacccttgcccgtaaattcgtgatagctgtcgtaaagctgttaccgactggcgaagatttcgccagtcacgtctacccttgttatacctcacaccgcaaggagacgatcatgaccaataatcccccttcagcacagattaagcccggcgagtatggtttccccctcaagttaaaagcccgctatgacaactttattggcggcgaatgggtagcccctgccgacggcgagtattaccagaatctgacgccggtgaccgggcagctgctgtgcgaagtggcgtcttcgggcaaacgagacatcgatctggcgctggatgctgcgcacaaagtgaaagataaatgggcgcacacctcggtgcaggatcgtgcggcgattctgtttaagattgccgatcgaatggaacaaaacctcgagctgttagcgacagctgaaacctgggataacggcaaacccattcgcgaaaccagtgctgcggatgtaccgctggcgattgaccatttccgctatttcgcctcgtgtattcgggcgcaggaaggtgggatcagtgaagttgatagcgaaaccgtggcctatcatttccatgaaccgttaggcgtggtggggcagattatcccgtggaacttcccgctgctgatggcgagctggaaaatggctcccgcgctggcggcgggcaactgtgtggtgctgaaacccgcacgtcttaccccgctttctgtactgctgctaatggaaattgtcggtgatttactgccgccgggcgtggtgaacgtggtcaatggcgcaggtggggtaattggcgaatatctggcgacctcgaaacgcatcgccaaagtggcgtttaccggctcaacggaagtgggccaacaaattatgcaatacgcaacgcaaaacattattccggtgacgctggagttgggcggtaagtcgccaaatatcttctttgctgatgtgatggatgaagaagatgcctttttcgataaagcgctggaaggctttgcactgtttgcctttaaccagggcgaagtttgcacctgtccgagtcgtgctttagtgcaggaatctatctacgaacgctttatggaacgcgccatccgccgtgtcgaaagcattcgtagcggtaacccgctcgacagcgtgacgcaaatgggcgcgcaggtttctcacgggcaactggaaaccatcctcaactacattgatatcggtaaaaaagagggcgctgacgtgctcacaggcgggcggcgcaagctgctggaaggtgaactgaaagacggctactacctcgaaccgacgattctgtttggtcagaacaatatgcgggtgttccaggaggagatttttggcccggtgctggcggtgaccaccttcaaaacgatggaagaagcgctggagctggcgaacgatacgcaatatggcctgggcgcgggcgtctggagccgcaacggtaatctggcctataagatggggcgcggcatacaggctgggcgcgtgtggaccaactgttatcacgcttacccggcacatgcggcgtttggtggctacaaacaatcaggtatcggtcgcgaaacccacaagatgatgctggagcattaccagcaaaccaagtgcctgctggtgagctactcggataaaccgttggggctgttctgatataagaagctggtcgcattgggtattcattgcctgatgcgacgcttacgcgtcttatcatgcctacgggaacctgaccgtaggccggataaggcgtacacgccgcatccggcataaacaaagcgcacgttgttacaatttacgttttaaacctacgtgcgcaataacccagactacgccaacagaagtacgtttctggggcgtgttttgtcaggagtttaatctcgcgtttcgatggtgagcgggcgaaccaggccgtaaatcaccattggtgatccgaggccaatcagcaataaacggtagataattgaaggtttaatacgcttaatctgtactgtggatgttttactggagttattcattagtttggccaatagttccactatttcaatatgataaacctcgtcctgttgaaaaaccagacagcacatttaagaaagtatataaaaaacaatatgtcgttatataaataaggaaattgcactgcatcatggcatttcataatatgcgttaattgttcttttttatattctttgagggaaatatgttcctggactattttgcactgggagtgcttatttttgtatttctggtgatcttctatgggatcattattttacatgatattccctacctgattgccaaaaaacgtaatcatcctcatgccgacgccattcatgttgctggttgggtgagtctttttacgttacatgttatctggccgtttttgtggatttgggccacgctttaccgcccggagcggggatggggaatgcaaagccatgattcatccgttatgcaactgcaacagcgcattgccgggctggagaaacagctcgccgacatcaaatcctcttctgccgagtaatacttatggatttactgattattttgacctatgtggcttttgcatgggcaatgtttaagatcttcaaaattcccgtaaataaatggaccattcccacagcggccctgggtggaatatttattgtcagcggtctaattctgttaatgaactataaccatccgtatacctttaaagcgcaaaaagcggttatttctattcctgttgtcccacaggtgactggtgtggtgattgaagtgacggataagaaaaatacgctgattaaaaaaggtgaggtgctatttcgactggacccgacgcgttatcaggcgcgggtggatcggctgatggcggatatcgttaccgcagaacataaacagcgggcgttgggcgcagagttagatgagatggcggcgaatactcagcaggcaaaggccacgcgggataaattcgctaaagagtatcagcgttacgcacgtggcagccaggcgaaagtaaacccgttttcagaacgcgatatcgatgtggcgcggcaaaattatctggcgcaggaagcctccgtgaagtcatcggcggcggaacaaaaacagatccagagccagctggatagcctggtgttgggtgaacattctcaaatcgccagcctgaaagcacagctcgcggaagcaaaatataaccttgagcagacgatagtgcgtgcgccgagcgatggttatgtgacccaggtactgattcgtccgggtacctatgccgcgtcgctgccgctacgtccggtgatggtgtttatacccgatcagaaacgacaaatcgtggcgcagttccgtcagaactccttgctgcgactggctcctggcgacgatgcggaagtggtgtttaatgctctgccaggtaaggtattcagcggtaagctggcagccattagtccagccgttcccggcggagcttatcagtcgaccggcaccttacagacgttaaacacagcgccgggttcagatggcgttatcgcgaccattgaactggatgagcacactgatttgagcgctttaccagacggtatttacgcccaggtggcggtttactctgatcatttcagccatgtctcggtgatgcgcaaagtgctattacgcatgaccagctgggtgcattacctttatctcgatcattaatcttcgctttccgccgcttgttcaggccgcagttgctgcgactgagcaagctggtggcgaatttcacgcagcatttcatccagcacatactggacccgccagggctggtattcccgtttacggaagatagccaccagatccagccaccattcatagggttgctgaaagcagggcaccagcgtgccgtcttgcaggtcgctctgcacacttttgtctggcgcaaacacaatccccaggtgatttcgtgccagctccagcgcagattgcgtgttgtcgcaaacgtaatttcccttcacgcgataatcccgcacctctttactcccggcgacgttgaagcgccagatattcgcgtcgtcgatcatcatcgagtcgatcaaaatacaggagtgatgttcgagttcgtcaggacggctaatgggatgtttctcaagatagcgctggctggcataagcggttacggcatattgggtaataaaactggcaaccagcgattcatcttttggtggagcgtagctgattaaaacatcacaatcatcaggaaattcgacgccttcataaaaggcattacgctcaagattgcaggtttttagcgataaggtgatatcaccgatatctttaattttatcgattacatgtttggataaataggtaattatgccggttggggcgtagatggtgacccgaccacgtttctcatgcttataatctgcaataaaattattaagttgctcgtttctgtccagcatgtcgttgatgtacggtaacagcgcggtgccaaaaggtgtgagcatcagctgccgggtggttcggtcaaagacttttaaacccacttttgattcaaaatcagcaagatatttgctgacgttggcctgtgcgatgccaagtacagtcgcggcatggctgatattttcactggcagcgattaccgagataatttttaactcccggtacttaagttgtaattttgtcatcgcaacagcccaattatatataattttatatattactatataaatatgaatcttgcaccggagaaattgtaagcattattatgccgactcttttttatcttattttaaaatggaataccggacatgttaattaatcgcaatattgtggcgttatttgcgttgccttttatggcaagcgcaactgcttctgaattatccattggtgctggtgcggcttataatgaatcgccttatcgcggttataatgaaaatacgaaggcaattccgctgattagttatgaaggtgatactttttatgttcgtcagaccacgttaggttttattctgtcgcaaagtgaaaaaaatgaacttagcctgaccgcatcctggatgccgctggaatttgaccctaccgataatgacgattatgccatgcaacagcttgataagcgtgatagtacggctatggcgggggttgcctggtatcaccacgagcgttggggaaccgtgaaagcctctgcagctgcggacgttctggataacagcaacggctgggtgggggagctatcggtattccacaaaatgcagataggtcgtctgtcgctgacacctgcgctgggcgttctctattatgacgagaatttcagtgactattactatggcatttcagagagtgagtcccgtcgtagcggtctggcaagttattccgcgcaggatgcctgggtgccctatgtcagcctgacggcaaaatacccgataggagagcacgtcgtattgatggcgagcgcaggatacagcgagctgccggaagagattaccgacagcccgatgattgatcgtaatgagagttttacctttgtcaccggggtgagctggcgtttttaattcaccggtggatgtcggtgcggctggtgctccgtcgtaatgccacaaaggttgttgctctggattgctctgttcataccgggaacctggcgtctgaatcaggatcttatggctgaacaatcccttgccttcaaatgtcgtaaatggcgcatcggcgggcagcaacaggttatgcagtgactcgacgttgtcggcctgctccatgcaatacggtttaatgacgttggctatttccggcagatttttcagaaacatactggtttaacgccagcagcgtggaagcggcgttacagcaaggaacatatcaattcgtagtgccggggcgatgaagccccggcgtgagggattactgcccgtaataggcattggccccatgcttacgcaggtagtgcttatccagcagttcgttttgcatcgcagggagctgcggcgcaagctggcgcgagaatagacccatataggcgcattcttcgagtactacggcgttatgcacggcatcggcggcgtttttaccccatgcgaacgggccgtgagaatgcaccagcaccgccgggatttgtgccggactcctgccacgttcttcgaaggtttcaatgatcacttcgccggtctgatattcatattcgccgttaatctcctctgcggtcatctgtcgcgtgcaggggatggcaccgtaaaaataatcggcgtgggtggtgccccaggcggggagatccagcccggcctgtgaccagatggtggcgtggcgcgagtgggtatgcacaataccgccaatttcggcatagcgacggtagagcgccagatgcgttggtgtatcggaagagggttttttgctgccttccaccaccttaccgctggctatctcaaccaccaccatatcgtcggcggtcatcacgtcgtactcgacgccggaaggtttgattaccatccattgccgcgtttcgtctaccgcgctgacattgccccaggtgaacgtcaccagatggtgagcgggaagcgccagattcgccgccagcacgtcggctttcagttgctctaacatataaatccagcctcctgcatacgcgcttcaatccaacgccgcgcctgaataatctccagcaccggctctttggctttttcggtccacatctcaatcaggaaagaaccgcgatagttcagtttatgcagcgttttgaagatgccaacgaaatcgacgcagccttcgccaaacggcacgtcgcggaactgtccgggactttgcccggtgactggctgggtgtctttcaggtggatcgcggcgatacggtcaatgcccagtttcagttcggcgggaacatcattgccccaggcgctgaggttgccgacgtccgggtagacggtgaaccacggtgaggcgagcatctcgtcccattttttccatttgctgatggagttcataaacgcggtatccataatctccaccgccagcattacttgtgatgccgccgcctgttcgactgcccacgccagcccttcagcaaaacgttgccgggtgccttcgtcgtggtcttcgtaatagacgtcataacctgccagctggatggtgcgaatgccgagatcgcgcgccaggcgaatcgctttactcatgatttcccgcgcccgttcgcgcactgcctcgtcacggctaccaaagggaaagcgacgatgtgcggacaggcacatcgacgggatcccaacacctgtttcgatcatcgcggcaaccagcgaagtcctttgtgcggcgctccagtcaagacgtgagagccgttcgtcggtttcatccaccgacatttcgacaaaatcaaaaccgcagctttttgccagcaccagccgctccggccaggagagatctttcgccagcgctttttcataaatccctaactgatgattacgcacgcgcacctccccagatagcgtcgatttgcgcatggaaatcgccagccacttgcgccggatttgccgcgcctgccagtgcccgcccggcaataaacgctttcacgcggatatctttaaacagcggcaggtcagcaggggtaatcccgccagtaatggaaagctcaaggccgatatctgaaagcgccttcatgcgtgccagatcggcttcgccccactgttgcccgctggcctgtgcatcacgaccgcgatgataaatggcctgccgcacgccaatacgatgccagtcgcgggcgtcgtccagcgtccagttaccgaacagctctatctgaatttcacccccgcagcgttgtgccattgcgtggcctttttctaccgtcgcgagcggcgcggcgcagatgatggtcatccagttagcgcctgcgccaaacgcctgttgcgcgagcgtttcaccagcgtcggcgaccttccagtcagcaacgatgattttgtccgggcactgttcgcgcaaggctttcaccgcgccaagcccttcgtttaaacagagaatggtgcccgcttcgacgatatcgacgctgtcttttaacagcgtcacgtcgcgctgcgcggcttcaagtgatgagtggtcgagggccagttgcagaagtggtcggctcataatgtgtgctccttaatgcgggcgtgaaagccctgaagtgcggcaatgagatgctgataacgttgatattttttttggtaaagctgatgggcggtcatatctggcagcagggtgcgcaccgggtgtcgcaagtcacgttgggcttcgctgaagttgtgataaaccccggtgccgacgcgggcggcaagggccgcaccaaagcagccggtttcttccacctgcggcagctcgatacgcagaccgctgacgtccgccagcatttgcatccagacatcggagtgcgccgggccgccagtgacgcgtagggtgtgaacatcagtaaaacgttcgcgcattcggttgaggtgggtcatatggctgaacaccaccccttcatagatggcctgcaacaggtgcgcgcgggtgtgaatggcctgcatcccgtagaaaccactggtcatctcgagtccggcgttgctgccgtacaggaacggcaggaaaaagagatcgcccccagccttcggcaagctggcaacggcctgattgatctcatcaaacgagatttctccccactgtgcggtaaaccattcgaggttgccggaagaggtagggctggcttcgtgaacgataaattcaccatcgttaacgtagcgaccatagacatacggatgcgcttcaccgtcacgtaaaccgcgggttatgccgctggtcaccgcccaggtccccatcaccgcattgagggtaaattcgtcttcgatcccggcgcagagtgcggtggaaaccacatcaaacaggccgccaacaacgggcgtacccgctttcagaccggtcagggcggctgtctgagcggtgatctccccgcagatttcggcagatccgacaacaggcggcagggcgtgattgatttcagcgatccccagccagtcggtgaggcacgggtcatattccccaagactcatgttgtagaggttggactcggaaatattgctctcttcacagcctttgacgccagttaaacaccagcgcaggtagtcgtgcgtcatcatcacgcagccaatttgcgcgtagcgttctggttcgtgctctttcagccagcgtaacagcgacaccggatgcccggtccacaaggtttgtcgggtcagcgggtagagtttttccgggatgccatcttcctgccagcgacgaacgatttccatcgcccggcggtccgaggacaaaatagcattcccgagcggtttgtcgtttttatccagcaaaaacaagccctttccctgtgcggagatgccgataccgacaatttgttccccgctaacaccagaatgagtaagcagggcgcgaatgacagccatgcagcattgccacagttctgccatatcgcgctctgcccagcctggctgcgggcttaatgcgcacagcggcaggcgctgcacgcctgcctcccggccttcgcggtcatacagcccggctttcagccagctaccgccacaatctaaccccagccagtattgcgtcatggtttattgcacctcatccacggctttcagcagatcagctccctgcggcacatctttaacaaacatgtcgcgaacctgattccccagtgcgtcgctaaaggctttgcggtcgagatcggtgatgacttccacgcccgcttctttcatgccgtcgatgattttttgctgatcttcagcaaccagtttgcgctgatagttacccgcttcttgtgcagatgaaactagcgcctgctggaactccggacttaagccatcaaacttcgctttgttgatcaccaccagaagcggggaataggcgtggtgcgtcagagaaaggaacttctgcacttcgaaaaattttgctgaccagacgacgttgatcgggtgttcctgagcgtcgatagtgcgggtttccagcccggtatagacttcggcaaacggcatcgggatcgggttagcgccaaagactttgaatgcggcgatattcatcgggctattgttggtgcggattttcagccctttcaggtcggcgggggttttaaccggtgcgcgcgagttggtgacatcgcgccagccgttttcccagtaggccagtactttcagtcctttaccttcaagtgaggctttcagatcatcaccgactttgccgtcgagcgttttatgcgcgtgagcggtatcgcggaacaggaaagggacatcaagcaagttcatcactggtgataacccggcaaagttattcgagccggacatttccatatcgatggtgccgccacgtacgccgctgatcatcgcctgcgcgttaccgagagtgctgtccgggaacagttttaatttcagctcgcctttggttctctcctgcaataaatcattgaattttttcgccgcaatatgttgcgagtcggtttgtgatgtttcataaccgaaacgtaaagattgtgccgccagagaagatgtgctgaatgcagccaggccagcaatgaataatgcgtaggttacagagcgtaatttcataatattttccttttaattaatccatttcaaagggaggatgatgagatcgggaataaaaacaaatacgactaataatgaatataaaaccaggacgtaagggaaaacgcctctgactgcatcatcgaatttgagttttgccacccctgaaataacgttaagtacattaccgataggcggtgtaattaagccgattgagcagttaatgataaacatgacaccgaaataaatcggatcgattcctgcctctttaactaaaggcattaataccggggtaagaattaataccgtcggcgttaaatccatgaccatgccgacaatcaggatagccaccataatgacgataaacagcagacgcggtgaatcgaccaacggttgcagtaaatcagaaaccatcatcggcagttcagcaatggtaatcagccaggcggaaacttgtgccgaggccaccagaaacataaccactgaggtggttttcgccgcgccaatgagtacatgccaaagtgtggcgaaggtcatttcacggtaaataactgtggcgacaaacagcgcatagaaagcagcaacggccccggcttcggtaggggtaaacaggccggagcgaaacccgccaataatgatgactggaagaaacagcgcccagataccggagacaaaagagtgccagatttcctgcatcgttgctttttgctggcggggtaaattaaggcgactggcctgccaccaccaggtaagcatcagcgttgcgcccatcatcatgccaggggcaatgcccgccataaacagcttactgatggataatccgctggaaacgccgaagataataaacggaatggaagggggaataattggcgcgataatgccgccagaggcaatcagccccgccgcccggttgaccggatagttggcgctgcgcatcatcggcaccagtagagcggcaacggcggcggtatccgcaacggcagaaccagaaaggctcgccataatcatagctgccagcacgccgacgtagcccagcccgcctggtttatgccccaccagtttcatcggcaggtcaacaatgcgttttgacaagccgcccgcattcatgatttcacccgccagcacaaagaacggaatcgccagcagggagaagctatcggctccgttcaccagcgtttgtgccatgatctggacatcaaacatgtccagccagaacattaacgccgccccgcacaacaacagtgcccaggcaataggcaaaccgatagcaataccacccaacagacagcccagaaaaatcagcacagccatgattaagctccttgcggtggcgacgttagagaattgctacgcgtgatgagttgatataaatgacgcagttcaaagaatgcgataacgaggctggtgggcagacaagcggcatacatcaggccgatgggtaaaccgaggatcggtgaataatcgctccagtcctgaattgtttttagcgttgcgccccaggccagtgcgccacaaataaataagattaaggaatgggtaaccagagcgactcgtcgctgccatgcgggggagagtttctccaccagaaaggtgacctgaacgtgggcgttatccataaaagctacaatcgcgccaataaacgttaaccagacaaataaataacgtgacaattcatcaacagataaaatgcttgtctgaaaaccatatcttaaaataatgtttataaatacaatacaggaaagtacggcgagattaatcgccagtattgcttcgagtatttttttcatagctattccttgaggctatgtctgtcataattcaagtcgcatgtgcagcaacctgaattattaatatagttagagcaataacattacccaggcgttctggcgtagacgattattcgattaattcagcgccgttaatgcgactttaaccacaatttttcgtatctcagaggctgtttgcataatacaacctggtcggtgaacatcctgcggaaagaaaattgcgtagctgcccggtatcatttctataaatgattcatgttcactgtcgtgataaaaaataatattgcgctgctctaatagtgattcgctgactttattatttcccgtatcaatagcaatgccgattttctcttcgccccacgccagaaactgaatatcgatataccgacgatgcacttccggacggtttaccaccgcttcgcgtgtggttaaatcgataatttgcgtataaatatttttgccgtcgatttcgacaacgcccggctccagggcgttgaaatcggtagcgcgcagaaaatcgagcgccttttcaatggcggcgggcaaacggcacggattgggctgcgcgatatgtccaaaaatcatgacttatctcctcataacgcctggattttggcccacacgctgtcatcaacagtgatgccgttacggcggttttcggccagcagggtagtaaattcatggccgggtaagcgaatggcctgattttcgtcagcacgctcggcactagtaacgtaatccatgatgcgttgcagcttggcatcgcgggtgggaccgtcgataagcttgtccacttcaatggcaataaaaatttgtgaaatgccgtattcgtcgctgttgtcctgggtgacttcggcaacggatgcgccgtcggaaaggagagtagcgatcatatccagcacaatcgacatgccagaacctttccagtagcccatcggcaaaatgcggcgattcttctcgataacgccaggttctttggtcaaattgccctcatcatcaaagccaccatcgaccgggagctgacgacctgccagacggttaacttctaacatgccgtaagagaacatcgacatcgacatatcgaccatggtgatcggcgtggaaggaatggcgacgatcagcgggttagtgcctatgcgacactcttttgcgccccacggcggcattacggcgatggagttggtccagcaaatgccaatatagcctttttccgccgcctgccagccgtagctgccgccgcgcatccagtggttggcattacgtagtgccaccagaccaataccgtgatcggcagccagttcaatggcgcgatccatcatctttttcgctgtcaggttaccgatcgaacgctgggcgtcccactgttcaattgcgccgaggctggttatacgtttgggttgggcatcaggaatgatatcgccgttttccagttgttgaatgaaacgagggaaacgattaacgccgtgagaataaacgccggattcggtggtgcgggcgaacatctctgcacaggcgtcagccgtttcgctgtcaacgccgcgtgaaattaagacccgattaaaggctgcttttaactgctcaaatgtcactttcatcccaggcttccttgtttttttgatcgcttttttggcttaaaatttcaatatgcgaaacttgatttcaaatatatcgatcactttttaacaaggcaatctgattgatgaatttcaaaagacataaaaatcaattggttataaattatctgtcgagatcgtgaactacggcacactttgcgctaccatcaggacgcgacaaaatggggaaagaagtgatgggaaaaaaagagaacgagatggcgcaggaaaaagagcgtccagccggaagccagagtctgtttcgcgggttgatgctgattgagattttgagcaactatccaaacggttgtccgttggcgcatctttcggagctggctggtttaaataagagtaccgtccatcgcttattgcagggattacagtcctgcggctatgtgaccaccgcgcctgccgcagggagttatcgcctgaccaccaaatttattgccgtcgggcagaaggcgctgtcttcgctgaatatcattcatatcgccgctccgcatcttgaggcactgaacatcgccactggtgaaaccattaacttctccagccgcgaagacgatcacgctattttgatttataagctggaacccacaaccgggatgctgcgaacccgtgcctatattggccagcatatgccgctctactgttccgcaatgggcaagatctacatggcgtttggtcacccggactacgtgaagtcatactgggaaagccatcagcatgagatccagccgttaacccgcaataccattaccgagctgcccgcgatgttcgacgaactggcgcacattcgtgaaagcggagcggcgatggacagagaagaaaacgaactcggcgtctcctgtattgctgttccggtgtttgatattcatgggcgggtgccgtacgccgtgtcgatttcgctttcgacatcacgtctgaaacaggtgggagagaaaaatctcctgaaaccactgcgtgaaaccgcgcaggctatttctaatgaactgggatttactgtcagggatgacctgggcgcgatcacataacgctttggacaagtgccaaaactttaacatttccttcgttggatcaaagcagtagggacgcgctctctggcactctgctgttttagtgcaaaggagtgatcatgaaccggtttattattgcggatgcgacgaaatgtatcggttgccgtacctgtgaagtggcttgcgcagtgtcgcatcatgagaatcaggattgcgctgcgttgtcaccagacgagtttatttcccgtattcgtgtcattaaagaccactgctggaccacggcagtagcctgtcatcagtgtgaagatgcaccgtgcgcgaatgtctgccctgttgacgcgataagccgcgaacatgggcatattttcgttgaacaaacacgttgcattggctgtaaaagctgtatgctggcttgcccgtttggtgcgatggaggtcgtttcttcgcgcaaaaaggcgagggcgattaagtgcgatctgtgctggcatcgggagacgggaccggcctgtgttgaagcctgcccgacaaaggcgttgcagtgcatggatgtcgagaaagtgcagcggcatcggctacggcagcagcctgtttgaaacgttttccggcgtttctcaacgccggaacagtgcgctttgtttatgccagatgcggcgtaaacgccttatccggcctacaaattcttccaaattcaatatattgcagaaatcatgtaggcctgataagcgtagcgcatcaggcaatttttagtgactttcagcccaggctctttctatctcttccgccagaatcttcacccccgcctcaattttctccggctctggtacgtagttcatgcgcatacattgatgcgtatgcggccacggtttatccagccctgggaagaagttgtgccccggcaccatcagcacgccgcgtgctttcaggcgctgatagagctgcttggtcgtaatgggcaaatccttaaaccatagccagaggaaaatggctccttccggtttatgaatcaggcagcgattttccggtaaatagcggcgaatgatggcgatagtttcctgaacacgctggtagtaaaacggtttgatgactgtttcagacaggcgcagcagatcgttacgcttaatcatttcacacatcatcgccggaccaataccgccaggtgccaggctgataatgccgttcatattggtgatggcggtgatgattttttcattggcgatgataatgccgcagcgggagccaggtagacccagcttggaaagactcatgcacagcacgatattcggattccatagcgggcgcgcttcactgaagatgatacccgggaacgggacgccataagcgttatcaatcaccagcggaatgccgtgttgattcgccagcgcgtcaagcttcagcaactcttcgtcagtaatcacattgcctgttggattcgtcggccgggagacgcaaatcatcccggtttcttcgccaatatgcagatgctcaaaatcgacgtggtatttaaactggccttccggcagcagttcaatattcggacgcgcagagacaaacagatcttcttccagtccggcgtcagcatagccaatgtattccggtgcaagcgggaacagcacttttttgacccgaccatcggcacggcgtccggcaaacaggttaaataagtagaaaaacgcgctctggctgccgtttgttagtgcaatattctgtggttcgatatcccaacccaacttctcgcgcagcattccggcaagcagtgtgagtagctccgttttcccctgtggaccgtcgtagttacacagtgcatcagtcgctttgccactttccagcatgtcggtcagtagcgtctggaagtagtcctgcatttccgggatctgcgccggattaccgccgccgagcataatcgcgccaggcgtgcgtaaaccgtcgttcagatcttccatcaacagcgtaatgccggagtggcgggtaaatttgtcaccaaaaagggagaatgtcatagcgggatatctgtcgaactctgtagcaaggaaggtaacaataacgctacatttgctggggtgcaaatcggtctgttgaagagtgagcggtgctttatcctgcaacgctgattagggctgacattttatcctggttggcggcttcccgaggtactgacgaacgggaagccggaaaagttactgttgccctgcccagacgaccagcactttatcgtcgccatgctcacgaacaaagccgtagccctgcttcagcaaaagtgtcgtttgtttgcccgcgccaattgcgggatggcgggcgcggaactggctgattttctgccagtgcgcgacgctggcggcagatttaccgctaacatcctgccagttcatatccgaacgtgtaccttgcagcggatcagaacctgtaggaccgaacggacgcgaggattcatcaccataaaagatttgtaccgcgcctggcgctaatagtaataactctgctgctttgtcgcccccttcacggaacaggcgggtatcatgcgacgagaggtagctcaacacgttgaaaccctgcaatttctccgccatttgctgccaggtcgtatccatctgcgccagacagtcgactgctttcgccgcctgctcctgataatcgaaattgatcatcgcatcgaagccgtggcgatagtagtcactttgcatcacgccgtggccccaggcttcaccggtcatccagaaaggtttgtcatctaatgctttgtcggggttagcttttttccattcgcgaagcgcggcgctggcttcggttttcagttgctgccaggcgggcaactcaacatgtttggcggtatcgacccgaaaaccatcaatcccatagtcgcggacccactgacttaaccagtgggttaagtaatcgcgcggcgtatagccgtcaatggctttggcgtgggtatccattttgtttttatagaacaccggcagaccagaagcggtagttgattcggttttgatatccggcaaaaaggctagcgacatagtgagatcgtcgaatccaggattgtcgtaatcgccgatatccgttctgatccagttttttccccaccatttatcccagcctgttttgtcgctgaaattaatgtaatcgttaaagctatgccaggtttgcccggcggcaggtttccagtcgctccagcgttcacccagcgattttttcacttcgtcaccagaaagatataacgcgccaaactgatactcctgcatatccgccagcgtggcatagccggtgtggttcatcacgacatcaaagagaatacgaataccgcgctgatgtgcgctatcaaccagcgtccgtagatcggcttcgttgcccatattggcatcaagattcgtccagtcctgtgtgtaataaccgtggtaggcataatgcgggaaatcgccttttgtaccgccgccgacccagccgtgaatttgctcaaatggggcgcttatccataaagcattaacgcccaactgctggaggtaatccagtttgttggtcaggccgcgtaaatcgccgccgtgaaaagtgccaatttccgccataccgtctttatgacgtccgtaactctggtcattactgggatcgccgttttcgaaacgatctgtcagcacaaagtaaaccgtggcgttatgccagtcgaaaggggcggatgtgtcagtttctgcccgttccagcaggagtaaaccgttgctggtggcagcgggttgtaacattatttgaccgttcttcactatcgcaatttgctggctgtaataatcccgtacggcggctccttccgggaaagtggcgctgacatccactgtgagcggtaatccatcccatttcgggcattcacggaccaggcttgctaccggttcggcggcgttctggatggaaatcatcaatgttggcgtaccggagcgggtgtctatttgcagcgtatattcgccgtccctgaacaatcgccattgaggcggcgtgttgctacaaggttgcagggaaagcatctgattgagttttatcgcatccgcaggctgccagcactgttggtcaaaatttagcgttagtggacgcgtacctttgggcaactgcgcgtggctgacaaatgttcctgtcccctgttcgctaaaggcgggaaaccccggagaagtccagctggcggcaacggcgaagccaggaaggagtgtcagaaaacaggcggcgagtttcatggcggatgagtccttattgctgcgatttcagacagtttgccagcgataagccaaacaaaactcatccctgagcggtaagtccacaggatgagaagcaagggtgagcgatctcgcgcaaaaaacggctgaattttgcgataacccccacattttctgcgatttagcgccaatctgaatcgttaacacgtgacatagtttcagatttggactattccttggggtgctcttgacagctatttttgatatgatttgagattcaactctcaaatttgtgaaaaatataaggtgttggaatgattaaatccgaccaggagacctgatgattttgactcccatacgacgatatggggcgatgattcttatgttactcactctggtgttttcgagtgaggtgttagcgaagacgcacacaacaacagcgagtcaaaagtcccacttaactaaagctagtaataaacaggtaagcagtaaacaagagtattctcgcaatagtgcaaagagtagttcacttcctgatttgcgaaaatacccttccggaacaccaaggaaaaaggcgtttctccggaccgtaatgccttacattaccagccaaaatgcggccattactgcggaacgtaactggctcatttcaaaacagtatcagggccaatggtcacctgctgagcgtgcgcgtctgaaagacatcgccaaacgctacaaggtgaagtggtccggtaatacgcgaaaaatcccgtggaataccttgcttgaacgcgtagacattatccccaccagtatggtggcgacgatggctgcagcagaaagcggttggggaacgtcgaagctggcgcgcaacaacaacaacctgttcggcatgaaatgcatgaaaggacgttgtaccaatgcgccaggtaaagtgaaagggtactcacagtttagttctgtcaaagaatcggtgagcgcctatgtcactaacctgaatacgcacccggcttactcttcgttccgtaaatcgcgtgcgcagctgcgtaaagcggatcaggaagtgactgccacagcgatgattcacaagctgaagggctactcgaccaaagggaagagttataacaactacctgttcgcaatgtaccaggataaccaacggttaatcgcggcgcatatgtaattgcatttccttgagccttatccgacttgtcagtcggataaggctttttactttgtctcaggcagttgagctacgagcctgaagcgttgttggtgcgttttatcatgcctggcgggtaggtcggataaggcgttcacgccgcatccgacaaccacgcagcgttacctgatgtgacgccgacaattctcatcatcgctacaacatgacctcgctatttacatcgcgatactcttttggcgtcgtgtcatatgcttttttaaaaacagagtagaaatattgcagcgatggataaccgcacatttgcgatatctcattgatcgacaaggtggttgaaatcagcagactgcgcgctttctccagcttctcggcatgaatcatggcatggatggtttcacccacctcttctttaaaacgcttctcaagattggagcgcgagatcccgaccgcatccagtacctgatccactttaatccctttacaggcgtgattacgaatgtaatgcatggcctgaataacggcgggatcggtcagcgagcgataatctgttgagcgccgttcaatgacgcgaactggtgggaccaaaattcgctgtagcggcatttcttctttatctaataatcgatgcaacagttttgccgcctgatagcccatttgccgcgcgccctgagcgaccgaagaaagggcgacacgcgacagatagcgggtcagttcttcgttatcgatgccaatcacgcataatttttccggtacgggaatatgtagatgttcacatacttgcagaatatgccgcgctcgggcgtcagtaacggcaataatcccggtttgcggtggtagcgtttgtagccagtctgccagccgattttgcgcgtgttgccagttctctggcgcggtttctaacccctgataaaccactccgcgatacttttcttcggcgacaagctgacgaaatgcatattcgcgctcagtggcccaacgtttgccgcttgattccggaagaccataaaaagcaaagcggttaacgcctttctcttttaaatgcaaaaatgcgctttcaaccagcgcatagttatcggtggcaatgtaatgaacgggtgggtaactttctgcaaggtgatacgagccgccaaccccaacaatggggacgtcgacatcagccagcgcttgctcgatctgtttgtcgtcgaagtcggcaatgacgccatctcctaaccagtccttgattttatcaatgcgggcgcggaaatcttcttcaatgaaaatatcccattccgattgtgacgcctgtaaatattcccctacgccttctactacctgccggtcataggctttattggcattgaacagtaatgtgatgcggtgacgtttagtaaacatggttcttttcctgctgaatcatgcaaaaactcaaaaccggtaatacgtaaccggctttgagaaaatttttatcaaaatcaagaacggcgtttggttgcggagtccatccatactgccagcaacagaatcgcacctttaacgatatactgccagaaggtcggtacatccatcatactcatgccgttatccagtgaagccatgataaatgcccccattactgctccggcaacgcttcccacaccgccagccaggctggtgccgccaatcacgcatgctgcaattgcgtccagttcggcgatatttcccgcagaaggtgaaccagcgccaagtcgagaactaaggattaatccggcgatggctaccattaatccgttaatcgcgaacacggcaagtttggtgcgttcaacgttaatcccggagagacgtgctgcttccagattgccgccgatggcataaatgcgtcgtccaaatgccgtccgcgttgccataaacattccgccgagtaacagcaacgtcagcagcagaacaggagtgggaacgccacggtaatcattcaacagccagattgcgcctaatacgatgatagcggttaaagcctggcgaccgactactgcggtagaggccggagactgtaaacccaaagcctgacggcgcattcttccgcgccattgccaaccaacaaaagccattaagccaagcgcgccaatgatgaagccggtactggcggggagatagctttgcccaatttgtgacatcgcggcgctggtgggggatacagtcgtgccgttggtgatgccaatgagtatgccgcgaaatgccaacatgcccgcgagggtgacaataaatgaagggactttacggtacgcgacccaccatccgttccaggcaccgagaagcagtcccagaaccagcgtcacaatgatggtaagtggcaaaggccagcctaaccagacgtcacaaatcgccgcgacgccacctaacagccccatcattgagccgacggaaaggtcgatttcagcagaaattatgacgaacaccattcctaccgcgaggatgccggtaatcgcggtctggcgtaacaggttggagacgttacgggcgcttaagtaggcaccatcggtggtccaggtaaagaacagcatgattgcgatgatagctgcaatcatcacgaagacctgcaaattcagtgatttcagcccggagaagccaccggatgtcggtacggccaatttcacttcagacggattgcttttcgacatgatgttcgctcctcaatgcggcttccatcacctgctcctgagtcaggttatgatttatcaggttggcttttagtttcccttcatgcatcaccagtacacgatcgctaaggccgagcacttcaggtaattcggaagagatgacaataacggcaataccctgctggacgagttggttaattaatttgtagatctcgtatttcgcgccaatatcgatacccctggtgggttcatcaagaatgagaatgcgcgggttaagtaacagacagcgagcgaggatcgctttttgctgattgccgccgctcaaacgtccaatagcaaggtcgggggacgacgttttaactttgagttgctggattgattccagaatacatttttgctctgccgcgtcatcaagctggctaatgccaccggtaaatttattgagtgcggcgagggtaatatttttaccaaccgccattaccggaacgatgccgtcgcgctttctgtcttcggggaccatcgcaatcccctgggcgatggcttgctgacagttacgaatatctacctgtttgccatcaatataaatttttccttcccattgtccgggccacacaccaaacaggcactgaatggtctcggtacgtccggcaccaacgagtccggcaatacccaatatttcgccacgtttcagggaaaacgagacatcattaactcgtttaatatgacgattaaccggatgccatgccgtcagatgttcaatacgtaatatttcatctccggtggtatgtggttcattagggtaaagcgcggttaactctcgcccgaccatcatggtgataatatcgtcttcactcattccggcagcatcacgcgtaccaatgtgctgtccgtcgcgaataacgcaaatcgtatcggaaatcgctttgacttcgttgagtttgtgcgaaatataaatacaggcgataccgtgctgttgtagatcgcgaataatatccagtaaaatcgacgtttcctgctcagttaatgaggctgtcggttcatcgagaattaacaagcgcacctgtttattaagtgccttggcaatttcaaccagttgttgttgcccaagccctaaatcgccaacgcgggtatcaggtgaaatggataaactgacctgtgcgagcagcttctgacagcgtagcgtcatcaggtcataatccataatgccattgtgggttatttcgttacccaggaagatattttccagcacggtcaattctttcaccagggccaattcctgatgaatgatggcgatacctttgcgttcggtatcgcggatgtgactcgcctgaatctcttctcccgcaaaaataatttcgccttcgtaggagccatggggataaataccacacagcactttcatcagcgttgatttaccagacccattttccccacaaagtgagacgatttcgccagcattcaaccgcaagcagacgttatcaatcgccttcacactgccgaaggttttggtaatgttcttcatttcaagtagataaggcataacgactccacctaagccaattcattcacgcggcatggagagaaatcacgcccccgctccgcgctggggcgtaacgcttacagctcgctctctttgtggaatccgtctttaattaccgtatctttgatgttgtttttattcacatcgatcggtgtcaggaggcgggaggggacatctttcaggccattattcagtgtggtatctgcttttggttcctgaccattgcccaactcaacggcaatttctgcggcagtatttgccaacaacgtaataggtttatacaccgtcatagtttgcgtaccggcagcaatacgtttaatacctgcgagatccgcatcctggccggagattgctactttccctgataaaccttgcgcgcttaatgcctgaattgccccacctgcggtggcatcgtttgaggcaactacagcatcaattttgttattattggcggttagcgcgttttccataattttcaatgcgttttccggtaaccagccatcaacccattggtcaccaacgactttaatttttccggaatcaacgtaaggttttaacactttcatttgtccggcgcggaacagcttggcgttgttatctaccggcgagccgcccatcaggaagtaattaccttgcggaacaatatcgaccagggcttttgcctgcagttcaccgactttttcgttatcgaaagaaatataaaaatcgatatccgcatcgttaatcatacggtcgtaagctaatactttaatgccttcttgtttggcttcttttacaacgttacttaatacctgaccgttatacggaataatgacaagaacatcgacaccccggtttatcatgttttcaatctgcgacatttgtgtttcttcattgccatttgcagactgtacaaatactttcgcgccgagagattctgcctttttcacaaagatatctcgatctttttgccagcgttcaagacggagatcatcaatcgccatacctattttgacttctttggcgtgtgcagcaacgttggtaagcaggagtgaggtgcaaagggtgagtagaatgttctttattttcatggtgtagggccttctgtagttagaggacagttttaataagtaacaatcaccgcgataaacgtaaccaatttttagcaactaaacaggggaaaacaattacagatttttatctttcgattacgatttttggtttatttcttgatttatgaccgagatcttacttttgttgcgcaattgtacttattgcatttttctcttcgaggaattacccagtttcatcattccattttattttgcgagcgagcgcacacttgtgaattatctcaatagcagtgtgaaataacataattgagcaactgaaagggagtgcccaatattacgacatcatccatcacccgcggcattacctgattatggagttcaatatgcaagcctattttgaccagctcgatcgcgttcgttatgaaggctcaaaatcctcaaacccgttagcattccgtcactacaatcccgacgaactggtgttgggtaagcgtatggaagagcacttgcgttttgccgcctgctactggcacaccttctgctggaacggggcggatatgtttggtgtgggggcgtttaatcgtccgtggcagcagcctggtgaggcactggcgttggcgaagcgtaaagcagatgtcgcatttgagtttttccacaagttacatgtgccattttattgcttccacgatgtggatgtttcccctgagggcgcgtcgttaaaagagtacatcaataattttgcgcaaatggttgatgtcctggcaggcaagcaagaagagagcggcgtgaagctgctgtggggaacggccaactgctttacaaaccctcgctacggcgcgggtgcggcgacgaacccagatcctgaagtcttcagctgggcggcaacgcaagttgttacagcgatggaagcaacccataaattgggcggtgaaaactatgtcctgtggggcggtcgtgaaggttacgaaacgctgttaaataccgacttgcgtcaggagcgtgaacaactgggccgctttatgcagatggtggttgagcataaacataaaatcggtttccagggcacgttgcttatcgaaccgaaaccgcaagaaccgaccaaacatcaatatgattacgatgccgcgacggtctatggcttcctgaaacagtttggtctggaaaaagagattaaactgaacattgaagctaaccacgcgacgctggcaggtcactctttccatcatgaaatagccaccgccattgcgcttggcctgttcggttctgtcgacgccaaccgtggcgatgcgcaactgggctgggacaccgaccagttcccgaacagtgtggaagagaatgcgctggtgatgtatgaaattctcaaagcaggcggtttcaccaccggtggtctgaacttcgatgccaaagtacgtcgtcaaagtactgataaatatgatctgttttacggtcatatcggcgcgatggatacgatggcactggcgctgaaaattgcagcgcgcatgattgaagatggcgagctggataaacgcatcgcgcagcgttattccggctggaatagcgaattgggccagcaaatcctgaaaggccaaatgtcactggcagatttagccaaatatgctcaggaacatcatttgtctccggtgcatcagagtggtcgccaggaacaactggaaaatctggtaaaccattatctgttcgacaaataacggctaactgtgcagtccgttggcccggttatcggtagcgataccgggcatttttttaaggaacgatcgatatgtatatcgggatagatcttggcacctcgggcgtaaaagttattttgctcaacgagcagggtgaggtggttgctgcgcaaacggaaaagctgaccgtttcgcgcccgcatccactctggtcggaacaagacccggaacagtggtggcaggcaactgatcgcgcaatgaaagctctgggcgatcagcattctctgcaggacgttaaagcattgggtattgccggccagatgcacggagcaaccttgctggatgctcagcaacgggtgttacgccctgccattttgtggaacgacgggcgctgtgcgcaagagtgcactttgctggaagcgcgagttccgcaatcgcgggtgattaccggcaacctgatgatgcccggatttactgcgcctaaattgctatgggttcagcggcatgagccggagatattccgtcaaatcgacaaagtattattaccgaaagattacttgcgtctgcgtatgacgggggagtttgccagcgatatgtctgacgcagctggcaccatgtggctggatgtcgcaaagcgtgactggagtgacgtcatgctgcaggcttgcgacttatctcgtgaccagatgcccgcattatacgaaggcagcgaaattactggtgctttgttacctgaagttgcgaaagcgtggggtatggcgacggtgccagttgtcgcaggcggtggcgacaatgcagctggtgcagttggtgtgggaatggttgatgctaatcaggcaatgttatcgctggggacgtcgggggtctattttgctgtcagcgaagggttcttaagcaagccagaaagcgccgtacatagcttttgccatgcgctaccgcaacgttggcatttaatgtctgtgatgctgagtgcagcgtcgtgtctggattgggccgcgaaattaaccggcctgagcaatgtcccagctttaatcgctgcagctcaacaggctgatgaaagtgccgagccagtttggtttctgccttatctttccggcgagcgtacgccacacaataatccccaggcgaagggggttttctttggtttgactcatcaacatggccccaatgaactggcgcgagcagtgctggaaggcgtgggttatgcgctggcagatggcatggatgtcgtgcatgcctgcggtattaaaccgcaaagtgttacgttgattgggggcggggcgcgtagtgagtactggcgtcagatgctggcggatatcagcggtcagcagctcgattaccgtacggggggggatgtggggccagcactgggcgcagcaaggctggcgcagatcgcggcgaatccagagaaatcgctcattgaattgttgccgcaactaccgttagaacagtcgcatctaccagatgcgcagcgttatgccgcttatcagccacgacgagaaacgttccgtcgcctctatcagcaacttctgccattaatggcgtaaacgttatcccctgcctgaccgggtgggggataattcacatctatatatctcagtaattaattaatatttagtatgaatttattctgaaaatcatttgttaatggcatttttcagttttgtctttcgttggttactcgtaatgtatcgctggtagatatggagatcgttatgaaaacctcaaagactgtggcaaaactattatttgttgtcggggcgctggtttatctggttgggctatggatctcatgcccattgttaagtggaaaaggctattttcttggcgtgttaatgacagcaacttttggcaactatgcatatcttcgcgcagaaaaactcgggcaactggatgatttttttacccatatctgccagttagttgcgttaatcactatcggtctcttgtttatcggtgttttaaacgcacctatcaatacttatgaaatggtgatctatcccatcgccttttttgtctgcttgtttggtcaaatgcgtttgtttcgctcggcatgagcaacataaagctcttacatattcaggaatgaaaggaatactgtgatggacaacaaaatatcaacctattcaccggcctttagtattgtgtcatggatagctctcgttggtggtatcgttacctatctgttagggctatggaatgcagagatgcagttaaatgaaaaaggatattattttgccgtactggtattaggactgttttctgcggcgtcttatcaaaagaccgttcgggacaagtatgaaggcataccgaccacttccatttattatatgacctgcctgactgtctttattatctctgttgcattactgatggtaggtctgtggaatgcgacattattactcagcgaaaaaggtttttatggactggctttcttcttaagcttgtttggtgcagtagcggtgcagaaaaatattcgtgatgccggaataaacccaccaaaagaaacacaggttacccaggaagaatacagcgaataactcacgtaagcccggtcagtccaatgtgaccgggcttttacttaactcactaatctgtttctgtcgattcgttgtaccagcatagaaagtaacaaactcgctgccaacgtcgcgcaaaagatccaaataatatccagtattggccaatttttaagctcaattccccgggtgcgcagcgcatggataatcaaggcgtggaatccgtatatacccaatgaatggcgggagattaagccaagtccgcgaatggtacgcgtatccagcgtgtttttaaccagagtcaatagcgcgattgcgcagataaaaaccatcggcccacagtaaagataccaggtatcggcaaaatttccgcgccactgcaattcatataatgtcccgcgagagataataaaaacccccgtcgcaaacagcgcggcgctcacccacgacagtgctttatgctgtgtgtccatcatccctatagcgcggcccaacatgccatacagaatgtagtaaaaagtatcgccattgatatataagttaattggcagccattcaaaaccgtcaattttctgcggcactgtgtttgggttagcgataatgccaatcaccgccattagcaccagcaacatttttccgccgacgttcttcacctgaatcagcggtgaaaccagataaatcaccgcaatcgcgaagaaaaaccacaagtggtaaaacactggcttttgcagcaggtttttcagcgctaactccatattgatggaggtaaacagcgcaatgtagagcagtgcgattgcgctataaaaaatcagacataagccgatacgcaagaaatggcgcggctgggcgctgcgttcgccaaaaaagagatagccggaaatcatgaaaaatagcggcacgctgacacgagaggcagaattcagaacattggcgatatcccatgtgacggggctaacactatgagcattggtcacataccaggtagtggtgtgaatcatcaccaccattaaacacgctatccctcgcaggttatcaatccagtaaattttgggctgcatctgtgtctctgtatctggttaaaaaaagtctgaccgataaatcatttggttggcgcactggaataatctgagttttatcactacagcttatagaggcttaaggaaattcgtaagatatcagccactataccgatataaataataagactcacctgcaaaccagacggtaatttaatgatgatgaacgctttctttccggcaatggcgcttatggtgctagtgggttgttctataccgtcacccgtgcagaaagcacaacgggtaaaggttgatcctctgcgttcgttgaatatggaagcgttatgcaaggatcaggcggcaaaacgttataacaccggcgagcaaaaaatcgacgtcaccgccttcgaacagttccagggaagctatgaaatgcgcggttataccttccgtaaagagcagtttgtctgttcttttgacgcggatggccattttttgcatctttccatgcgttaagccctgctttttcccgtttcgtactgtatatcttccatccagcgggtatactgatcccttcctttaaatccacacgtatccagcacgaaataatatgcaaaagtttgataccaggaccttccagggcttgatcctgaccttacaggattactgggctcgccagggctgcaccattgttcaaccattggacatggaagtcggcgcgggaacctctcacccaatgacctgtctgcgcgagctggggccagaaccgatggcggctgcttatgttcagccttctcgtcgcccgaccgatggtcgctacggcgaaaaccccaaccgtttacagcactactatcagttccaggtggtcattaagccatcgccggacaatattcaggagctgtacctcggttctctgaaagagctgggcatggacccgactattcacgacatccgtttcgtggaagataactgggaaaacccgacgctgggtgcctggggactgggctgggaagtgtggctgaacggcatggaagtgacgcagttcacttacttccagcaggttggtggtctggagtgtaaaccggttaccggcgagatcacctacggtctggaacgtctggccatgtacattcagggcgtagacagcgtttacgacctggtctggagcgacggcccgctgggtaaaaccacctacggcgacgtgttccatcagaacgaagtggagcagtccacttacaacttcgaatacgcggatgtggacttcctgttcacctgcttcgagcagtacgagaaagaagcgcagcagctgctggcgctggaaaatccgctgccgctgccagcctacgagcgtattctgaaagccgcccacagcttcaacctgctggatgcgcgtaaagccatctccgtcaccgagcgtcagcgctacattctgcgcattcgcaccctgaccaaagcagtggcagaagcatactacgcttcccgtgaagccctcggcttcccgatgtgcaacaaagataagtaagaggcggctatgtctgagaaaacttttctggtggaaatcggcactgaagagctgccaccaaaagcactgcgcagcctggctgagtcctttgctgcgaactttactgcggagctggataacgctggcctcgcacacggcaccgttcaatggtttgctgctccgcgtcgtctggcgctgaaagtagctaacctggcggaagcgcaaccggatcgtgaaatcgaaaaacgcggcccggcgattgcccaggcgttcgacgctgaaggcaaaccgagcaaagcggcagaaggttgggcgcgtggttgcggtattaccgttgaccaggctgagcgtctgactaccgataaaggcgaatggctgctgtatcgcgcccatgtgaagggcgaaagcaccgaagcactgctgccgaatatggttgcgacttctctggcgaaactgccgatcccgaaactgatgcgttggggcgcaagcgacgtgcacttcgtgcgtccggtgcacaccgtgaccctgctgctgggcgacaaagtcattccggcaaccattctgggcattcagtccgatcgcgtgattcgcggccaccgctttatgggcgagccggaattcaccatcgataacgccgatcagtatccggaaattctgcgtgagcgtgggaaagtcatcgccgattacgaagaacgtaaggcgaagattaaagccgatgccgaagaagcagcgcgtaagattggcggtaacgctgacttaagcgaaagcctgctggaagaagtggcttcgctggtggagtggccggtcgttctgaccgcaaaattcgaagagaaattcctcgcggtgccggctgaagcgctggtttacaccatgaaaggtgaccagaaatacttcccggtgtatgcgaacgacggcaaactgctgccgaactttatcttcgttgccaacatcgaatcgaaagatccgcagcagattatctccggtaacgagaaagtcgttcgtccgcgtctggcggatgccgagttcttcttcaacaccgaccgtaaaaaacgtcttgaagataacctgccgcgcctgcaaaccgtgttgttccagcaacagttggggacgctgcgcgacaaaactgaccgcatccaggcgctggctggctggattgctgaacagattggcgctgacgttaaccacgctacccgtgcgggtctgctgtctaagtgcgacctgatgaccaacatggtcttcgagttcaccgacacccagggcgttatggggatgcactatgcgcgtcacgatggcgaagcggaagatgtcgcggtggcgctgaatgagcagtatcagccgcgttttgctggtgatgacctgccgtccaacccagtagcttgtgcgctggcgattgctgacaagatggataccctggcgggtatcttcggtatcggtcagcatccgaaaggcgacaaagacccgtttgcgctgcgtcgtgccgcgcttggcgtgctgcgaattatcgttgagaagaacctcaaccttgatctgcaaacgctgaccgaagaagcggtgcgtctgtatggcgataagctgactaatgccaacgtagttgatgatgttatcgactttatgctcggtcgcttccgcgcctggtatcaggacgaaggttataccgttgacaccatccaggcggtactggcgcgtcgtccgactcgtccggctgatttcgatgcccgtatgaaagcggtatcgcatttccgtaccctggatgcagctgctgcactggcggcggcgaacaaacgtgtatctaacattctggcgaaatctgacgaagtgctgagcgaccgcgtgaatgcctctaccctgaaagagccggaagaaattaaactggcgatgcaggttgtggtgctacgtgacaagctggagccgtactttacggaaggtcgttaccaggatgcgctggtcgaactggctgagctgcgtgaaccggttgatgctttcttcgataaagtgatggtcatggttgatgacaaagaattgcgtatcaaccgtctgaccatgctggagaaactgcgcgaactgttcctgcgcgttgcggatatttcgctgttgcaataataacgccgttattaaatagcctgccatctggcaggctttttttatcgctaaataatacagcaacctttaataatcttctgctgaataaagattatctcatatattaattttatgagatttttttaggattatatcaaggagaagaaacaaacttattaagctagaatagccacgggtgcttgagactgtttgtctcaggtattcaccgaaaggcagacagagaaaagccccacctgactataaatcaaagtttgtactgaccccaaaaagttggacagttaaacacgaggcatataggtctgattccgatattcaattggagtcagaccttttaatttcaggctaattcttctgctgttgtagtattcaatatattccgtaacagcatccttcagttcgcttatattactgaactcatcaagataaaaacactccgactttaaggttccaaagaaacactccaccacagcattatccagacaattgccttttctggacatgctttgtttaataccatgttctttaaggatattttgatatcttctcatacgatactgccatccctggtcagagtgcagaacaggatgctcgtgaggattaagctttttgaatgcctgatcgagcatattctcaaccatgttcatcactggtctttccgaaaggctgtaagaaataacttcgttgttgaagagatctattactggagacaaatacagcttgcgcccattgactgcaaattcagtaacatcggtaacccacttctcgtttggccgcgtagccttgaaatctctttggagaacattaggggcggtttgccctacctctcctctgtaagagcggtatcgcttgaccttaatcgctgctttaagtgagagggttcccatcaggcgctgaacagctttatggttaatctgtttcccttctcgatgaagagacagcgttaccctacggtatccgtatcggcctctattctcgtgataaatctcactaatacgctttttaacgtccgcatacttgtcaggcttgctgagagcctttagatgataataaaacgtactgcgcggtatctccgcagccctgagaagctcatcaagaggataaaactgccttagctcgttgagtactttcactttttcgtgggatgagctaaggctttcagcttttttagatacataagccgcgtttcaagaaatcgaacttgcctttcaagatcctcaatgcgtcggtcttttgacagctccaatgctgatgccgctttttctggatcaactgatattgcaatgtttcttttggtgccaatcttgagcgcgcgtaaaccagcttctccgcgctcttcatagaccttcagccacctggctacagaaccactaccagcaagcataaagtgagcagcagcctgattaagggacatgtgctgctcgatcacagctttcacgaccttaatacgcaactctggatcagcactaacgcctttaggtttgggaattaaacctttttctccatgtttttcatagagggcaacccatgtcctgacctgggttcgggggacaccaaaacgtgccgagatgatcctgtaaccatcatcagttgtgaagtagtgattcacgacttcaaggcgcttttcaaaagggtattttggctttgacatattaggggctattccatttcatcgtccaacaaaatgggtgcagtacatactcgttggaaatcaacacaggaggctgggaatgccgcagaaatatagattactttctttaatagtgatttgtttcacgcttttatttttcacctggatgataagagattcactgtgtgaattgcatattaaacaggagagttatgagctggcggcgtttttagcctgcaaattgaaagagtaagagtcttcggcgggaaattattcccgccttacttacggcgttgcgcattctcattgcacccaaatttattcttcacaaaaataataatagattttattacgcgatcgattatttatttcctgaaaacaaataaaaaaatccccgccaaatggcagggatcttagattctgtgcttttaagcagagattacaggctggttacgttaccagctgccgggcctttagcgccgctttcgatggtgaaggacactttctgaccttcgtccagagatttgtaaccatcgttctggatagcagagaagtgtacgaacacatctttagagccatcgtcaggagtgatgaagccgaagcctttgtcagcgttgaaccattttacgataccagtcattttaccggacatagtgtattacctttaataattaagtgtgcctttcggcgatatggcgtgctttacagattttgaagcgttaaaggaatgtgcactacgaggggtatcaacgataactcttgaagggacttgccttactacactgctttaatggtctgtacgtcaaaccgttgatgtgcattaagccacgcattggcgggtgatgcaacaattatttttcatatttatgattaatcggttggaaaacggtcctgtcatcaggaccgtaaacagcaataaagtggataaaagtctattccatcaactgcttacttaatgccgggttggcttgaatcaaacgcatcaattttagttcggcacttgaaggcttcacgcgtctggattcccattcctttaccatggcgactgatacgcccaaaacccgggcgaaatcatcgatttttaatcctgtcccttttcgtaactgctcaatttcggtacaggacgttgttctgtgcgtcagggtaattttctgcgtttcatctttaaaaacaatctgttccaggctgctcaacagctcatgcattggatctttatattccattgaaaactcctcaaatcacactgcgggatcgtgaattgcatcgaagctcattaagaatagtcgggaaaagcagacacagcggggtgaagtcagggcatgctctggctatgattcgattcagcctgtcatttagcgtgacttatagccacctaacgatctgataaatgccgatatatctcttaccactcctgttttgtaaagatttcgaaaatctaaccttctgcgaaggcgtaaatctctggctacaaaaaaggcaacggcactatcattttttaacaatgaaacaacaaattaaccttgtttcattttctccatgattttaccaggaagattacgtagaaagggtatcctgcaagcctgtcctggactatccttgtcacgtcagacacgcgtgtgtcgttgtgcgctttttttgggtgaaaggagtaagaaaatggcgacaggaaagtcctgctctcgctggtttgcgcctcttgcggcgttattaatggtagttagcctgagtgggtgttttgataaagaaggcgatcagcgtaaagcgtttatcgacttcctgcagaatacagtgatgcgtagcggtgaacgtctaccaaccctgactgccgatcagaaaaaacagtttggtccttttgtctctgattacgcgattctgtatggttattctcagcaggtgaatcaggcgatggattccggtctgcgcccggttgtagacagcgttaacgcaattcgcgtaccgcaggattacgttacgcaaagcggtccgctgcgtgaaatgaacggttcgctgggtgtgctggcgcaacaactgcaaaatgcgaagttgcaggccgatgctgcgcactctgcgctaaaacagagcgatgatttgaaaccggtctttgatcaggcattcaccaaagtggtaacgacgccagctgatgcattgcaaccgttgattccggcggcacaaactttcacgcaacaactggtgatggttggagactacattgctcagcaaggtactcaggtgagctttgtcgcaaatggcatccagttcccgacttcacagcaggcaagtgaatataacaaactgattgcgccattaccggcacagcatcaggcgtttaatcaggcctggactacagcagttactgcaacccaataaagagtaaaagcccgagcgattatcgggctttactctacgcagtcgcggcttagtccgcgacgtgcggattcacacagttcttctcaacctttccttgtaacgcatcaatcaaattatccacggcacaggcggccatgccataacgcgtctcatgggtggcagatccaatatgcggtactgcgacgacgttggccattgagagcaacggcgaatctacggacagtggctcttgttcgaagacatccagcccggcagcgtgaatttcgcctttctgcaatgctgcgatcagtgcattttcgtcaaccaccgggccacgtccggcattaatgaaaatggcggaggatttcattttggcgaattgttctgcgccaaacagatgatgcgtctcatcagttaacggcaggatcaggcaaacgaaatctgactcttgtaacagagtatccaaatcgcagtagcgggcgttgaagcgttcttctgcttctttatggtggcggcgcgcgttatagaggatgggcatgttgaagccaaagtgcgcacgttgtgccagcgccatgccgatccgtcccatcccgacaatgcccagtgttttatggtgaacgtcagtgccgtaccagtccgggcctatgctcgcggtccattcgcctgcttttacccgttctgctacctccacaacccgacgagcggtagacaacaccagcgccatcagcgtatcggcgacggtttctgttaatacggttggcgtgtgcatcagcagaatttttcgggcggtaagcgcatcgacatcaaaattgtcatagccgacggagatcgttgatgtggcacgcagtttcggcattttttccagcaatgcggcatttacattctcgtttgaacccagtaaaccttcagcttcggcaaaaattgctgcattttgttcgacggtttgtgggctgaggtttgccacctggtgaacggtgaaatgctcttgcaggcgttgcagtaaatcatcaggtaaggctttgtagaggataacggacggcttcatgcttctctccattcactgataaggcgatcaccttagcctgaaatatgatgaaggaaaactgaagaatgccaggtgatttctgcatcacctggcatgaaagggattacagcgggcttaaggtaatttctacacggcggttttgcgccttaccttctgcggtgctgttgctggcgattgggttagccgggccaaggccctgagtacggatgcggctggcgtccacgccctgggtgatcaacgcgctggcaacggaatccgcacgttgctgggagagacgcatgttcaggtcgtgaccacccgtgctgtcggtataaccaatcacgttaaccgccgttttcggatactctttcagtaccattgccacgccggtcagggtgttagcgcccgccggtttcagggtcgcgctgctgctgtcgaaggtcacattgttcggcatattgaggataatgttatccccgctgcgggttacgctaacaccagtgccgcgcattttgtcgcgcagcttcgcttcctgcacatccatgtaataaccaacgccgccgcccagagctgcgcctgctgctgcgccaatcagcgcgcctttaccgcgatctttcttcgaagaagagagcgcaccaatacccgcgcccacgagagagcccagacctgcgccgatagcagatttacctgcttcgcgttcgccggtgtaagggttagttgtgcagccagataccgccagagcgccactcactacggcggcaataagataaacacgtttcttcattgttaatccttaataacctttttattctttgccacgggttccgtggcgggagattatgccgcgtgaacatgaagattattcctgggaatactcggaaatttgtaagtaatatttaactgctcaatacatctaacctttcaggagtcttcggtttggccaactcatcctcacgatattccgttctgactgccgcccattgggggcccatgctggttgaaaccgacggcgaaaccgtgtttagctcgcgtggcgcgttagccacaggaatggaaaactccttgcagagcgcggttcgcgaccaggttcacagcaatacgcgggtacgatttccaatggtgcgaaaaggctttcttgcgtcaccggaaaacccgcaaggcattcgtgggcaggatgaatttgttcgcgtgagttgggatgaggcgctggatcttattcaccaacaacataaacgcattcgtgaggcttatggtccggcatcgatttttgctggttcctacggctggcgttcaaacggcgtgctgcataaggcctcgacattattacaacgctatatggcgctggcaggcggttataccgggcatctgggggattattcgaccggcgcggcacaggcgatcatgccgtatgtcgtgggtggtagtgaagtttatcaacagcagaccagttggccgctggtgctggaacatagcgatgtcgtggtgctgtggagtgctaacccactcaatacgctgaaaattgcgtggaatgcatccgatgagcaggggctttcttacttttctgcactgcgtgacagcgggaaaaagctgatctgcattgatccaatgcgatcggaaaccgtcgatttctttggcgataaaatggagtgggtggcaccgcacatgggcaccgatgttgcgctgatgctggggatcgcccatacgctggtggaaaatggttggcacgacgaagcgtttctggcgcgttgcaccacaggttatgccgtcttcgcctcttatttgctgggcgagagtgacggaatagcgaaaaccgccgaatgggcagcagagatttgtggtgttggcgcagcgaaaatccgcgagctggcggctattttccaccaaaataccaccatgctgatggcaggctggggaatgcagcgccaacagtttggtgagcaaaaacactggatgatcgtcacgctggcagcaatgttggggcaaatcggcacacccggcggcggttttggtctttcttaccattttgccaatggtggtaaccccacgcggcgttctgcggtgctctcttccatgcagggcagcttgccgggtggctgcgatgcggtggataaaatccctgttgcccgcattgttgaagcactggaaaaccctggtggcgcatatcaacacaacggtatgaaccgacatttcccggatattcgttttatctggtgggcgggcggtgccaactttactcatcatcaggataccaatcgcctgatccgtgcctggcaaaaaccggagctggtggtgatctctgaatgcttctggacggcggcggcaaaacacgcggatatcgttctgcctgcgactacctcttttgagcgtaatgatctcaccatgaccggtgattacagtaatcagcatctggtgccgatgaagcaagtggtgccgccacgctatgaagcgcgtaatgattttgatgtttttgccgagttaagtgaacgctgggagaagggcggttatgcacgttttacggaaggaaaaagtgagctgcaatggctggaaacgttttataacgttgcccgacagcgcggggcaagccagcaggttgaattgccgccatttgctgagttctggcaagccaaccagttaattgagatgccggaaaacccggacagcgagcggtttattcgcttcgctgatttttgccgcgatccgctggcgcatccgttaaaaaccgccagcggcaagattgaaatcttctcacagcgtattgccgattacggttacccggattgccctgggcatccaatgtggctggagccggacgaatggcagggcaatgccgaaccagaacagttgcaggtactttctgcccatccggcgcaccgcctgcacagccagctgaattacagttctctgcgcgaattgtacgcggtggcaaatcgtgagcctgtcaccattcatcctgacgatgcccaggagcgcggcatacaagatggcgatactgttcggttgtggaacgcacgcgggcaaattcttgccggagcggtcattagcgagggaattaaacctggcgtgatttgcattcacgaaggggcatggccggatctggatttaaccgctgacggtatttgtaaaaacggcgcagtgaacgtgctgaccaaagatctccccagctcgcggctggggaatggctgtgcgggtaatacggcgctggcatggctggaaaaatacaacggtccggaactgacacttacagcgtttgaaccaccggccagctcataatccatgtgggtagttgggtttcatcctgccatgcgcaatcgacaatgtgaaaaccctgtgcctggtaaaaatttatcgccggttgatttttttgataaacctccagcatcaggtggggatggcgctgctgcacatactgcatcagcgccttaccaataccgcgcctgacggccttcggtgcgacaaacatcgctgccagaaatcggccttccataatgctgacaaaaccgagaagcttaccgtcttcttcccagacccagttttgcgcgttggcaagataggcatcccgcaccagcggaatgcagtcacgccagtaattcgcttttataaagggatgcccccaggttgtactttccagccacagttcgaggatcgcggggagttctgaacgttgcgcttcccgaatcatggtttatttcccggatagcaacagcagccaaccacatgatcattcaccagcccacatgcctgcataaaggagtaacagattgtggtgccgacaaacttaaaaccacgttttttcagtgccttagatagggcgtcggaggcggacgtagatgtgggaatttcgctcaacgttgtggcttgtgtcacctgtggctgatgatttacaaacgaccagacaaagtcgacaaacggttcgccgttctgttccatttgcaggtacgcccgcgcattaccaataattgcctgaattttccctcgatggcggataatcccggcgtcctgtaccagtctttcgacatcctcttcctgcattgctgcgaccttcaccggatcgaactgatgaaagcaggcgcgatagttttcgcgttttttgaggacggtgatccacgataatccagcctgctgcccttcaaggcagatcatttcgaacagttttttactgtcagtttcaggcacgccccactcattatcatggtaggcaatataaagcgggtcctgactcacccagccgcaacgttccatactttccctcgctatgtacccgatcgtaaaaatttcagccgcttttcttgacgcatcggtgaaaaagtcaatatttaatacagggctactatgcccgatatccttcatacaatgacaataatattgccgaattcggctcttccctggagtcgtgttaatgatcataaaaaaaagcggtggtcgctggcagctaagcctgctggcgagcgtggtaatcagtgccttttttctcaacacagcttacgcctggcaacaagaatatatcgttgatacgcaacccggactttccacagagcgttacacctgggatagtgatcatcaacctgattacaacgatattttgtcgcaacgtattcaaagtagccaaagggcgctgggactggaagtcaatctggcggaagaaacccctgtggatgtgaccagcagtatgagtatgggctggaattttcctttatatgaacaggttacaaccggcccggtcgcggcattacattacgatggcacaaccacctcgatgtataacgagtttggcgacagtactaccacgctgaccgatccgttatggcatgccagcgtgagtaccttaggctggcgtgttgactcccggcttggcgatctccgaccctgggcgcaaatcagctataaccagcaatttggcgagaatatctggaaggcgcaatcaggcctgagccggatgacggcgacaaaccagaacggcaactggctggatgtcaccgtaggcgctgatatgttgctcaatcaaaatattgccgcctatgccgcgctaactcaggcagaaaataccactaataatagcgactatctgtatacgatgggggttagcgccagattttaacgtaacagtcacaattgaaaccattaaataacaatagttgtggcgatagtgggtgctaacttaccaaataataaatttggtgaataattgtcgcgtcattcattcctgaactaaggcatttcattccgttctgatggcatttcatgccgtttttccccaggcataaagtgcacttcgttatggttgtcggcagagatttttcctttttattactgcaggaatactgccatgacaccttcaaattatcagcgtacccgctggctgacactcatcggtactatcattacccagtttgcgctggggtcggtttatacctggagcctgtttaatggcgcgctttccgccaagctggatgcgccggtaagccaggtcgctttctctttcggcttgttaagtctggggctggcaatttcgtcttctgttgcgggcaaattacaggaacgttttggcgttaaacgcgtcaccatggcttccggcattttgctgggattaggcttcttcctgacagcgcattctgacaacctgatgatgctgtggttaagcgccggtgtgctggtgggactggcagatggcgcgggttatctgctgacgctctctaactgtgtgaagtggttcccggagcgtaaaggtctgatctccgcgttcgctatcggttcttatggtctgggtagcctgggtttcaaatttatcgacacgcagctgctggaaacggtcggtctggaaaaaacctttgtgatttggggagcgattgcgctgttgatgattgttttcggcgcaacgttaatgaaagacgcaccaaaacaggaagtgaaaaccagcaatggtgtggtggagaaagattacacgctggcagagtcgatgcgtaaaccgcagtactggatgttagcggtaatgttcctgaccgcctgcatgagcggcctgtacgtgattggggtagcgaaagatatcgcccaaagtctggcacaccttgatgtggtttccgcagccaatgcagtcactgttatttccatcgccaacctttcaggtcgtctggtgctgggtattctgtctgacaaaatcgcccgtatccgtgttattaccattggtcaggtgatatcgctggtgggtatggcggccctgctgtttgcaccattgaatgcagtgacgttctttgcagcgattgcctgcgtggcatttaactttggcggcactattaccgtctttccgtcactggtcagtgagttctttggcctcaataacctggcgaaaaactacggtgtgatttatctcggtttcggtatcggtagcatttgtggttcgattatcgcctcactgtttggcggcttctatgtgaccttctacgtgattttcgccctgctgattctgtcattggcgctttctacgacgattcgtcagccagagcagaaaatgttgcgtgaggcgcatggctccctttaatgctcagccgcgagctactgggcttcagcttccgtgtgcatcaaacgcatcaacgaaatgtataaacaatgactcgtaaaatttgggccaattaactggccctttttactgctttttgtaacgctaaagtctcttttcaaacttgcatttttgtaaatttgtgcttcatgcacactctttccccacactttttccctttgctgtggtctacttattcgcgcgtgtagattttacttatctgactacctccgcactttttccctgccgggcctgaaaagccactaagcagggtgttatcacctgtttgtccagggtttgtttgcatgagatacatcaaatcgattacacagcagaagctgagctttttgcttgcaatctatattggcctttttatgaatggcgcggttttttaccgccgcttcggcagctatgcgcacgattttaccgtctggaaaggcatttctgctgttgttgaactggccgccaccgtactggtgaccttctttttactacgtcttctttcgctgtttggccgccgcagctggcgtattctggcatcgctggtggtgctcttttccgcaggtgccagctattacatgaccttccttaatgtggtcattggttatggcatcatcgcttccgtcatgaccaccgatatcgacctgtcaaaagaagttgttggtctgaactttattctctggttaatcgccgttagtgcattgcctcttatccttatctggaataaccgctgtcgctacaccttgctccgacaactgcgaaccccagggcagcgtattcgcagcctggcggtcgtcgtactggcgggtattatggtttgggcaccgattcgtttgctggatatccagcagaagaaagtggagagggcgaccggcgttgatttgccgagttatggcggtgtcgtagcgaactcttatctgccatcaaactggctttctgcgttggggctgtatgcctgggcgcgggtcgatgaatcttccgataataattcattgcttaatccggcgaagaaattcacttatcaggcaccgcaaaacgttgatgacacttatgtcgtgtttatcatcggtgaaaccacgcgttgggaccatatgggtattttcggctatgagcgtaataccacgccgaaactggcccaggagaaaaatctggcggcgttccgtggttactcctgtgataccgcaaccaaactctcactgcgttgcatgtttgtacgtcaggggggcgcggaagataatccgcagcgcacattaaaagaacagaacattttcgcggttctgaagcagttaggattcagttctgacctctacgctatgcagagcgaaatgtggttctacagcaacacgatggcggacaacattgcttatcgtgagcagattggtgcggagccacgtaatcgtggcaagccggtagatgatatgttgctggtagacgaaatgcagcaatcgctagggcgcaacccggatggtaagcatctgatcattctgcataccaaaggttcgcattttaactacacccagcgttatccgcgtagcttcgcgcagtggaagccggaatgtattggtgttgatagcggctgtaccaaagcgcagatgatcaactcctatgacaactcggtgacctatgtggatcactttatctccagcgtgattgatcaggttcgcgataagaaagcgattgtgttctacgcagctgaccacggtgagtcaattaatgaacgcgagcacctgcacggcacgccgcgtgaactggcaccgccggagcagttccgcgtaccgatgatggtctggatgtcagataaatatctggaaaatccggccaatgcgcaggcgtttgcgcagctgaaaaaagaagccgacatgaaagtgccacgccgtcacgtagagctgtacgataccatcatgggttgtcttggctatacttcaccggatggtggaattaacgaaaacaacaactggtgtcacatcccgcaggcaaaagaggcagcggctaactaagcggcctgctgactttctcgccgatcaaaaggcattttgctattaagggattgacgagggcgtatctgcgcagtaagatgcgccccgcattcggtgattggcgcagcctggtagcgcacttcgttcgggacgaaggggtcggaggttcgaatcctctatcaccgaccaaattcgaaaagcctgctcaacgagcaggcttttttgcatctgcagctcatgaggatgagaacctccgggggcagggaggttcgactcgagcgaagcgagagaacgttgcgccagcaacggcccgcagggcgagccacgaagtggcgagtaatcctctatcaccgaccaaattcgaaaagcctgctcaacgagcaggcttttttgcatctgcagctcatgaggatgagaacctccgggggcagggaggttcgactcgacgtaggcctgataagacgcgtcagcgtcgcatcaggcaaatgtgccggccattgtcggatgcggcgcgaccgccttattcgacctacacgacacacatttccctgccaaatttgcgccccatatctcactatccattaacggatttgtgacagaaaccattgtctttttttatatttgcttaaatctttttttgcgttacttatggctggccctggcattttccgctgtgcgttttagcgttcatggtattaatcgctcagatatccaccttttcctcagatttttttcattaaatgcataaaacttaatcaccaaatgttgctaaatattaagctgattgttctggtcatgttggagtagcacaaatttctctgctgcaaatagctgtttgaagtttttttaatctttgtgtgtggattctcaccgttggtgtaaatcccggttggctgtattgacgttttcacattctgttgacagattgtaggtcacgaggggcattttatggaggatccgcactgttacactgatgttaattagtacggcatccccacctcataacgttgacccgaccgggcaaaaaacaaaaaaggtcaggcagcgacaacccactgcaaagggttaaaacaacaaacatcacaattggagcagaataatgcgtatttccttgaaaaagtcagggatgctgaagcttggtctcagcctggtggctatgaccgtcgcagcaagtgttcaggctaaaactctggtttattgctcagaaggatctccggaagggtttaacccgcagctgtttacctccggcaccacctatgacgcctcttccgtcccgctttataaccgtctggttgaatttaaaatcggcaccaccgaagtgatcccgggcctcgctgaaaagtgggaagtcagcgaagacggtaaaacctataccttccatctgcgtaaaggtgtgaagtggcacgacaataaagaattcaaaccgacgcgtgaactgaacgccgatgatgtggtgttctcgttcgatcgtcagaaaaacgcgcaaaacccgtaccataaagtttctggcggcagctacgaatacttcgaaggcatgggcttgccagagctgatcagtgaagtgaaaaaggtggacgacaacaccgttcagtttgtgctgactcgcccggaagcgccgttcctcgctgacctggcaatggacttcgcctctattctgtcaaaagaatatgctgatgcgatgatgaaagccggtacaccggaaaaactggacctcaacccaatcggaaccggtccgttccagttacagcagtatcaaaaagattcccgtatccgctacaaagcgtttgatggctactggggcaccaaaccgcagatcgatacgctggttttctctattacccctgacgcttccgtgcgttacgcgaaattgcagaagaatgaatgccaggtgatgccgtacccgaacccggcagatatcgctcgcatgaagcaggataaatccatcaatctgatggaaatgccggggctgaacgtcggttatctctcgtataacgtgcagaaaaaaccactcgatgacgtgaaagttcgccaggctctgacctacgcggtgaacaaagacgcgatcatcaaagcggtttatcagggcgcgggcgtatcagcgaaaaacctgatcccgccaaccatgtggggctataacgacgacgttcaggactacacctacgatcctgaaaaagcgaaagccttgctgaaagaagcgggtctggaaaaaggtttctccatcgacctgtgggcgatgccggtacaacgtccgtataacccgaacgctcgccgcatggcggagatgattcaggcagactgggcgaaagtcggcgtgcaggccaaaattgtcacctacgaatggggtgagtacctcaagcgtgcgaaagatggcgagcaccagacggtaatgatgggctggactggcgataacggggatccggataacttcttcgccaccctgttcagctgcgccgcctctgaacaaggctccaactactcaaaatggtgctacaaaccgtttgaagatctgattcaaccggcgcgtgctaccgacgaccacaataaacgcgttgaactgtacaaacaagcgcaggtggtgatgcacgatcaggctccggcactgatcatcgctcactccaccgtgtttgaaccggtacgtaaagaagttaaaggctatgtggttgatccattaggcaaacatcacttcgaaaacgtctctatcgaataattaaaagccatacaagactgatggcaaaggcaaaaatgcctgatgcgctccgcttatcaggcctacgaaaattctgcaatgtattgaatttgcacgattttgtaggccggataaggcgttaacgccgcatccggcataaacaaagcgcactttgtcaacaatctgtatacccggtggcgctgtgcctctgcgtgcagcgccatccggcagcaatacttcattccctgtccgataagggcgggaattgatttgtgagcaatacagacacgcagttccaggctgcgggtcactatagagaatccgggttatgttgcagtttattctccgacgtttgggactcgtcatccccacgtttatcggtattacccttctcacatttgcctttgtccacatgatcccgggcgatccggtgatgatcatggcgggcgaacgtgggatctccccagagcgtcacgcgcagctgctggctgaactcggcttagataaaccgatgtggcagcagtatctccattacatttggggcgttatgcatggcgatctaggcatttcaatgaaaagccgcatcccggtttgggaagagttcgtgccgcgcttccaggccacgctggaacttggcgtctgcgcgatgatttttgctacggcagtcggtattccggtcggcgtgctggctgcggttaaacgcggttccattttcgatcacacagcggttggcctggcgctgacaggttattcaatgcctatcttctggtggggcatgatgctgatcatgctggtttcggtgcactggaacctgacgcccgtctccggtcgcgtgagcgatatggtgttcctcgatgactccaatccgttaaccggttttatgctaatcgacaccgccatctggggtgaagacggcaactttatcgatgccgtcgcccatatgatcttgcctgccattgtgctgggtactattccgctggcggtcattgtgcgtatgacacgctcctcgatgctggaagtgctgggcgaggattacatccgcaccgcgcgcgccaaagggctaacccgcatgcgggtgattatcgtccatgcgctgcgtaacgcgatgctgccggtggtgaccgttatcggcctgcaggtgggaacattgctggcgggggcgattctgaccgaaaccatcttctcgtggcccggtctgggacgctggttgattgacgcactgcaacgccgcgactatccggtagtgcagggcggcgtattgctggtggcgacgatgattatcctcgtcaacttgctggtcgatctgctgtacggcgtggtgaacccgcgtattcgtcataagaagtaaggggacatcatgtcacaggttactgaaaataaagtgattagcgcaccggtgccgatgaccccgttacaggagttctggcactattttaaacgcaacaaaggcgcggtcgtcgggctggtttacgtcgtcatcgtgctgttcatcgcgatctttgccaactggattgcaccctataacccggcggaacagttccgcgatgcactgctcgccccgccagcctggcaggaaggcggcagcatggcgcacttgctgggcaccgatgacgtaggccgtgatgtgctgtcgcgcctgatgtacggtgcgcgcctgtcgctgctggttggctgtctggtagttgtgttatcgctgattatgggcgttattctcggcctgatcgccggttactttggcggcctggtcgataacatcattatgcgcgtggtcgatatcatgctggcgctgccaagtctgctgctggcgctggtgctggtggcaattttcggcccgtcgattggtaacgccgcgctggcactgaccttcgttgccttgccgcactatgtgcgcttaacccgcgccgccgtgctggtggaagttaaccgcgattacgtcaccgcgtctcgcgtggcgggtgccggggcgatgcgtcagatgtttattaacatcttcccgaactgccttgcgccgctgattgttcaggcgtcgctcggtttctctaacgccattctcgatatggctgctcttggtttcctcggcatgggggcacagccgccaacgcctgagtggggcaccatgctctccgacgtgttgcagttcgcgcaaagcgcctggtgggtcgtgaccttcccgggtctggcgatcctgctgacggtgctggcatttaacctgatgggtgacggtctgcgtgacgcgctcgatcccaaactgaagcagtaagaggttcgagatggcgttattaaatgtagataaattatcggtgcatttcggcgacgaaagcgcgccgttccgcgccgtagaccgcatcagctacagcgtaaaacagggcgaagtggtcgggattgtgggtgagtccggctccggtaagtcggtcagttcactggcgattatggggctgattgattatccgggccgcgtaatggcagaaaaactggagtttaacggccaggatttgcagcgtatctcagaaaaagagcgccgcaacctggtgggtgccgaagtggcgatgatcttccaggacccgatgaccagccttaacccgtgctacaccgtgggtttccagattatggaagcgattaaggtgcatcagggcggcaacaaaagtacccgccgtcagcgagcgattgacctgctgaatcaggtcggtattcccgatccggcatcgcgtctggatgtttacccgcatcagctttccggcggcatgagccagcgcgtgatgatcgccatggcgattgcctgtcggccaaaactgctgattgccgatgaaccgaccaccgcgctggacgtgaccattcaggcgcaaatcatcgaactactgctggagctacagcagaaagagaacatggcgctggtgttaattacccatgacctggcgctggtggcggaagcggcacataaaatcatcgtgatgtatgcaggccaggtggtggaaaccggtgatgcgcacgccatcttccatgcgccgcgtcacccgtatactcaggcattgctgcgtgcgctgccagaatttgctcaggacaaagaacgtctggcgtcgttgccaggtgtcgttcccggcaagtacgaccgcccgaacggctgcctgcttaacccgcgctgcccctatgccactgacagatgtcgcgctgaagaaccggcgctgaatatgctcgctgacgggcgtcagtccaaatgccattacccacttgatgatgccgggaggccgacactatgagtacgcaagaggccaccctgcaacaaccgctgttgcaggctatcgacctgaaaaaacattatccggtgaagaaaggcatgttcgcgccggaacgtctggttaaagcgctggatggcgtttcgtttaaccttgaacgtggcaaaacgctggcagtagtgggcgaatctggctgcggtaaatcgaccctcggtcggttgctgacgatgattgaaatgcccaccggtggcgagctgtattaccaggggcaggatctgcttaagcacgatccgcaggcgcagaagctgcgtcggcagaaaatccagatcgtcttccagaacccttacggttcgctgaatccgcgtaaaaaagtcgggcaaattcttgaagagccgctgctgatcaacaccagcttaagcaaagaacagcgtcgggaaaaagccctgtcgatgatggcgaaagtcggcctgaaaaccgagcactatgaccgctatccgcatatgttctccggcggtcagcgtcagcgtatcgccatcgcccgtggtctgatgctcgacccggatgtggtgattgccgatgaaccggtttccgcgctggatgtttcagtgcgcgcgcaggtgctgaatctgatgatggatttgcagcaggagttggggctgtcttatgtctttatctcccacgacctgtcggtggtggagcacattgctgatgaagtgatggtgatgtacctgggccgctgcgtggagaagggaacgaaagaccaaatcttcaataacccgcgccatccgtacactcaggcgctactttccgcgacgccgcgcctgaacccggacgatcgccgcgagcgcatcaagctcagcggtgaactaccaagcccactgaatccaccgccgggttgcgccttcaacgcccgctgtcgtcggcgcttcggcccctgcacccagttgcagccgcagctaaaagactacggcggtcaactggtagcttgttttgctgttgatcaggatgaaaatccgcagcgttaactcacaaaaccggggccatgcgctccggtttactcaatcagcttcaacagtggcgacaagcatagcaaaatgccgtacagcagaatcagccaggctttaaatccgcgaagtttttccagttgtgcgactttatagatcaggaaaaacggaatgaggcacgacacaataccatataacgggcttcccaactgaaagaacaccagcaccgatacacgaaacgaaacccaaatcgtcaacgtaatgacgataaaagcgcagatcgccagagtcagcacgcgtgagttaattttcttggtatcaataattcggcttaacagattgagaataatgcctttaatggcctcgtggaaaccgagataaatgccaaagaatgcggtcagtacggcaaagatattaagcaccgtagaggtgatatgaatgatatgcccagggatcacctgcgcggccagcgccagtgctgagatattttgttcaaaggcagaaacggcttcttcgtggctaattgagaaggtaaacgaaaaggcaaaaaacaggatcaccgcgatgagcgtgatataactaattcggtgggtacgcagcgcgagccgggttgccagtactttatccgcttcccgtttacgataggcaatattcattgggttaagtacctgaataaatactgcagaaaagaagcaaaatggaatggtaagcaagacatcgcggaaaaagacggaggcttgcgggaaggcggttatattggcgaaattccagtgcgggatcatcgcaaaaccgaacacgacaataatccctactttgaccaccaccattggcccggaaatcttaaacagtaatcgttcaccaccagacgcaatcgccaccagtacggcgaaaatagcgactttataaagtagagattgtgaaagatcggcatcggttaaaccgaaggttttcaggtacgaggcgctgtcgaaaaccacggagagagagtagataaaaatcccgtggataatcatcaaaaagtagataaccccgaggaaaattccccagttcttccccaggtaatgactgataatatcggtgtagtcattacaggaatcgctttcagaaagggtttttaaataaatgtcctgcactacccaggtggcaggataagcaatgatcgctgcggtaataaatacccaaattcccttcaagccaatttgtactggcatcagcacggttccggcaccaatcgccatgcctatgcataataaaacccagccgaagtcgtagcgtgtaaacggcaatttctgattgtgtttcgatagtgtgttgtgctgcataaagtcctgtccagaaagaagtcggcctcgcaaaaatgaataaacccagtttctcttgcgcaacaggtggagaagtcgaatacgcagtatgtaaaaaatgaggcaacagattcactggggaggtcgcgaggaggcgcaattctacaaaattgcgcatttcactaccagtctggagtcagcccggatatgaactgcaactattgcaaataaagaaattaagctggaaggcatcgcgcaatgaggaagattgccgggtgctgacagtaaaaagcaatcgtagaatcagcggcaagccggaaaggttccggtgaggcgcaatgttgcgggggctttatccctggtggcattggttgctggagagagaaaacccccgcacgttgcaggtatgcacctgacaacaccacgggggctaatcttgactctagaccactcaagaatagccgcgaaacgttgtcattacaacacaggcggctatatgacgttcgcagagctgggcatggccttctggcatgatttagcggctccggtcattgctggcattcttgccagtatgatcgtgaactggctgaacaagcggaagtaacgtgtcatgcgggcgtcaggctgccgtaatggcaatttgcgcccggaccaggccgcaggggggaaactctgcggcctttttcgttcttactgcgggtaaggcacccagtcgccgccgttcaggcgaacgtacggtttatcctggtattgaataactactgcatttgagttctcggagaccggtgctgtttgtggcaacccactggtgagttttttccagtcaacattgtcttcggtgaaaatcttgccatcgagaacgcgaaccaccagatcggagatagccaggaagctgctcggttgttcgatgacaatcggtgccccctgatgcggtgccttcatgccgaagaatttcaccccaacggggacgtcggtgatagacgggctagggatatcacgtaggccagatacctgcattctgtcgcccttcagcgcgccgccgtgttccggcaccacgaccaccatcactttacgacccgatttctcaagttcagtaaagaaggcgtccagttcatcaaagaatttctgcgcccgcgctttgtaatccgctgttttgctgacccccggataatggttgccgtcatgcagtggaagcgtgttgtagaacgtggcactacggctgtttttatctttttcggtaacgtccagccagcggttaagcacagcggtatcgtcataaaccggcgaaccatcaaagcccagcaaaataaccggcagatttgtttgatccatcaattcgctctgcatgccgccattttcgcgaacttctttcaaaaaaccgccgaactggccgttatgtcccatcatcaggtgctgggtaaagcccagtttcgaaaggttatcaaacagatagcagtcgttatttgccggttgatacagattagtgtgcgaagtctgcccgcagctggcgcgcagtaaacggatcgccgccgggccactgtaggaggtggcggagttaaagttcttgaactcaatatcgaaatgcgaccacagtggatgcgacatcaacccggcggcttctatatccgaccaggaaagcgaacagatgttaatcaccagtagttcaaatggctgagcatcagcgggcagcgaagacgggaaggtcgatttacgtttcgcctccgcgttatagaaattattcagccaggcgttaaggttcgccgttgttggcggtgcagtttgtgcgggcatatcacccactaccggtgcgccacccgtcgccgcaacggttgccgctgcgttaccacccgtcgttgttacagtggtcgtcggttgtccggctggccacaaggagaaacttggtcccgccagggtaagtacgttcagccatagcagtatggcaaccacaaaaacggtaatgcgaatccattgtgacaggaataaccaggccactaataaaacaaaaatggccccaatcatctgccagttaataaagcgtgtgacaaggtcgattaaataatcggtactgaaccccgccacctgcgaaccctggctcattatgctttccgggccaggcaaccaggtgtcatgccagaacaaagcaaagccgatcggcagggcaatccagtggcgcaagcgatgcaggctgtagcgcggaaggggcatcagcagaaacgcggcaaacaccaaattgaggagcggatggaagttaagatatcccgcccacaacaggccgaacttaaccagaaaatagaagttccagccggaaaggccgcgccagtattgccagagggaagaaggcatggcggtattttgcgtaaattgagtcattttttggttgccctggctttttccgtgcggcgtaacgtcccggccggtttaacataacgaggtttagcaaagaacaaacgtaaggtgtcgcgaatgcgtcgcaaagagtgccgcgccagatagcccagcgggaaaaatatcagtgcgcaaacgacaataatttcaatgatatcgctgatggtcatcatgatgagcgctccacagcatcatctaacagtcgcatgggttctggtattcgtcgccagtggcgaccatcgtgctcggcattgatgaccggtttagaactttgcgttaaaggcagcggcatgccccattgttctggggcaagcaagcgcatctgcaccagctcggcactgatttgatcatcttcaaaccagaccatacggtttgagaaaatgtcgccagtaggcaatgggaaaatatgattcaacgcggtatccagatcgttaatccgacagaatgagagaaacagcaccagccgattaccgccaatggtcatgatatcgccggtacggttagggcgacacagcgtcagggcttgttcaacgcggatacccggtaccggacgtagggcaaccagaacgcctttaccgtgggcaggtaatagagggttattcatcatgttgttgacggcattacagaacacatcccacttctggaaaccacgcagtttgagcggctgggtcattgacagcaaggtagtgatatcttccggcacatagcgactaaacttctgcccttgcacgctttcgatcatcgtcagacaacgggagagtggcgcattccacggaataaccatatttgcaccgcaggccaataacaaacgttcatcggtggcgcgcaggctagcggtattttcccgcacgaggattttcatcgcactaccgcgctggcgacgcagggtatgaatgctgcgggccagtggctcgatttgcgcattttgctgtaaagaaaagaccaccgtcgccgcctgagcggtacgggcttcattgaacaggacttcgttattgttgaacagttgccagtgttccgatagcggcggcgcaccttccagtacagcaacattactcagaatgcgtttttcgtcgctgcgtggttggatctccgcctcttcgctttgaactaatgtccagataccattttgttgctgaacgctaagctgctgacgggcgctgacccctttttcgttgcaccagaaggcaatatccagcaaatgttggtcaccctgaaaacgcaaactggcaagaccaaaaagtgaacggtattcctcaagcaacaatgaaaattgtttatcgttattatttccgggattaattaccaaaagcgaacaatggtttaacctgctccatttattcattttatccaaccatgagcgaagccgctcggcaggaatgttttgccatgcgttatttgcgcaaacaagaataaaaaggtaattatggggatcaatagaacactgcaaatcacgggtcaaatagtatagacctttttcatgatttagcattgaaaataattttattttttccggcccttgagaatcatctaattgaaagattttcgccggatcgctgtccatgctaatgaccgcgacgtgtgcggtttcagcctgggatgcaattgtttgattcgccagactgatagcatcttcatggcgatcgacgttaaaccaccagacgccgcctgctggcatatgtcgcagctcatcccataatgatgagataccgatagagaatacagggtccacaatgtccctcatgtcaccattttgtctgattatcagtttactagcgaaagctaagaaataaacctaccattgaaattaaaacttatcagatttagcatgtgaatcaatttagaaggtcacaagacgtgtgattttagtcttttcgtttttaactttttctgttgcgtaacggaaagtcaaaaagtgagcaaattcccgtctcgccgtaaacaataaaccggcgaaatgctcacggttagaattgtctcatgaacggtacggttatttcatagggatcaagcaaaatgaataacaatgaaccagatactctgcctgatcccgcgataggctatatcttccagaatgatattgtggcgttaaagcaggcattttcactgcctgatattgattatgccgatatttcccaacgcgaacagttggccgcggcattaaaacgctggccgttgctggcagagtttgcgcaacaaaagtaggggattggtgaatggccgtactgggatagcagggggtgcggggaggcgtggggacaacaaccatcaccgccgcattagcctggtcattacaaatgttgggagaaaatgtcctggtggtcgatgcctgcccggacaacttgttgcgcctgtcatttaatgttgattttacccaccgtcagggctgggccagagcgatgctggatggccaggactggcgtgacgctgggttgcgctacacctcgcagctcgatttgctgccttttggtcagttatccattgaagaacaagaaaatccacagcactggcaaacccggctgagcgatatttgctccggcttacagcaactaaaagccagcgggcgttaccagtggattttaatcgacttaccgcgtgatgcctcgcagataacccaccagctgctgagtttgtgcgatcactcgctggcaatcgtcaatgtggatgccaactgccatatccgactgcatcagcaagcgctgccggatggcgcacatattttgattaatgacttccgtattggcagtcaggttcaggacgatatttaccagctttggttgcaaagccagcgccgattactgccgatgctcattcatcgtgatgaagcgatggctgaatgcctggcggctaagcaaccagtaggtgaatatcgcagtgatgcgctggcggctgaagagatactgacgctggcgaactggtgcctgttgaactactccgggctgaaaacgccagtcgggagtgcatcatgagtatcctgacccggtggttgcttatcccgccggtcaacgcgcggcttatcgggcgttatcgcgattatcgtcgtcacggtgcgtcggctttcagcgcgacgctcggctgtttctggatgatcctggcctggatttttattccgctggagcacccgcgctggcagcgtattcgcgcagaacataaaaacctgtatccgcatatcaacgcctcgcgtccgcgtccgctggacccggtccgttatctcattcaaacatgctggttattgatcggtgcatcgcgcaaagaaacgccgaaaccgcgcaggcgggcattttcaggtctgcaaaatattcgtggacgttaccatcaatggatgaacgagctgcctgagcgcgttagccataaaacacagcatctggatgagaaaaaagagctcggtcatttgagtgccggggcgcggcggttgatcctcggtatcatcgtcaccttctcgctgattctggcgttaatctgcgttactcagccgtttaacccgctggcgcagtttatcttcctgatgctgctgtggggggtagcgctgatcgtacggcggatgccggggcgcttctcggcgctaatgttgattgtgctgtcgctgaccgtttcttgccgttatatctggtggcgttacacctctacgctgaactgggacgatccggtcagcctggtgtgcgggcttattctgctcttcgctgaaacgtacgcgtggattgtgctggtgctcggctacttccaggtagtatggccgctgaatcgtcagccggtgccattgccgaaagatatgtcgctgtggccgtcggtggatatctttgtcccgacttacaacgaagatctcaacgtggtgaaaaataccatttacgcctcgctgggtatcgactggccgaaagataagctgaatatctggatccttgatgacggcggcagggaagagtttcgccagtttgcgcaaaacgtgggggtgaaatatatcgcccgcaccactcatgaacatgcgaaagcaggcaacatcaacaatgcgctgaaatatgccaaaggcgagttcgtgtcgattttcgactgcgaccacgtaccaacgcgatcgttcttgcaaatgaccatgggctggttcctgaaagaaaaacagctggcgatgatgcagacgccgcaccacttcttctcaccggacccgtttgaacgcaacctggggcgtttccgtaaaacgccgaacgaaggcacgctgttctatggtctggtgcaggatggcaacgatatgtgggacgccactttcttctgcggttcctgtgcggtgattcgtcgtaagccgctggatgaaattggcggcattgctgtcgaaaccgtgactgaagatgcgcatacttctctgcggttgcaccgtcgtggctatacctccgcgtatatgcgtattccgcaggcggcggggctggcgaccgaaagtctgtcggcgcatatcggtcagcgtattcgctgggcgcgcgggatggtacaaatcttccgtctcgataacccgctcaccggtaaagggctgaagtttgctcagcggctatgttacgtcaacgccatgttccacttcttgtcgggcattccacggctgatcttcctgactgcgccgctggcgttcctgctgcttcatgcctacatcatctatgcgccagcgttgatgatcgccctattcgtgctgccgcatatgatccatgccagcctgaccaactccaagatccagggcaaatatcgccactctttctggagtgaaatctacgaaacggtgctggcgtggtatatcgcaccaccgacgctggtggcgctgattaacccgcacaaaggcaaatttaacgtcaccgccaaaggtggactggtggaagaagagtacgtcgactgggtgatctcgcggccctacatcttccttgtcctgctcaacctggtgggcgttgcggtaggcatctggcgctacttctatggcccgccaaccgagatgctcaccgtggtcgtcagtatggtgtgggtgttctacaacctgattgttcttggcggcgcagttgcggtatcggtagaaagcaaacaggtacgccgatcgcaccgcgtggagatgacgatgcccgcggcaattgcccgcgaagatggtcacctcttctcgtgtaccgttcaggatttctccgacggtggtttggggatcaagatcaacggtcaggcgcagattctggaagggcagaaagtgaatctgttgcttaaacgcggtcagcaggaatacgtcttcccgacccaggtggcgcgcgtgatgggtaatgaagttgggctgaaattaatgccgctcaccacccagcaacatatcgattttgtgcagtgtacgtttgcccgtgcggatacatgggcgctctggcaggacagctacccggaagataagccgctggaaagtctgctggatattctgaagctcggcttccgtggctaccgccatctggcggagtttgcgccttcttcggtgaagggcatattccgtgtgctgacttctctggtttcctgggttgtatcgtttattccgcgccgcccggagcggagcgaaacggcacaaccatcggatcaggctttggctcaacaatgatgataacgcgatgaaaagaaaactattctggatttgtgcagtggctatggggatgagtgcgttcccctctttcatgacgcaggcgacgccagcaacgcaaccactgatcaatgctgagccagctgtagccgcccagacggaacaaaatccgcaggtggggcaagtgatgccgggcgtgcagggcgctgatgcgccagtcgtggcgcagaacggtccttcgcgtgatgtgaagctgacctttgcgcaaattgcaccgccgccgggcagcatggtgctacgtggcattaacccgaacggcagcattgagtttggtatgcgcagcgatgaagtggtgacgaaggcgatgctcaacctcgaatacaccccatcgccatcgttactgcctgtccagtcgcagttaaaggtttatctcaatgatgaactgatgggcgtgctgccagtgaccaaagaacagttgggtaaaaaaacgctggcgcaaatgcccattaacccactgtttattagcgacttcaaccgtgtacggctggagtttgtcggccattatcaggacgtgtgcgaaaaaccggccagcaccacgctttggctggatgttgggcggagcagtggactggatctgacctatcagaccctgaatgtgaagaatgacctgtcacacttcccggtgccattctttgacccgagcgataaccgcaccaacaccttgccgatggtctttgcgggtgcgccggatgttgggctgcaacaagcctctgccattgtcgcctcgtggtttggttcgcgttctggctggcgtgggcagaacttcccggtactctataaccaactgccggatcgcaatgccattgtctttgcaaccaacgacaaacggccggacttcctgcgcgatcatccggcggtaaaagccccggtgattgagatgattaaccatccgcagaatccttacgtcaaactgctggtggtgtttggtcgtgacgacaaagacctgttgcaggcagcgaaaggtatcgctcagggtaacattctgttccgtggtgaaagcgtggtagtgaatgaagtgaaaccgctgctaccgcgtaagccgtacgatgcgccgaactgggtacgtaccgatcgtccggtcacatttggcgaactgaaaacctatgaagaacagttacaatccagcggtcttgagccagcagcgattaacgtttcgctaaacctgccgccggatctctacctgatgcgcagtaccggcattgatatggatattaattaccgctacaccatgccgccggtgaaagacagttcgcggatggatatcagcctgaataaccagttcctgcaatccttcaacctgagcagcaaacaggaggcgaaccgcctgctgctgcggattccggtattacaaggtttgctggatggcaaaacagatgtctctattccggcgctgaaactgggcgcgaccaaccagctgcgcttcgactttgagtatatgaacccgatgccgggcggttcggtggataactgtattaccttccagccggtgcagaatcatgtggtgattggtgacgactccaccatcgacttctcgaagtattaccacttcatcccgatgccggatctacgcgcctttgctaacgcgggcttcccattcagccggatggcggatctgtcgcaaaccatcaccgtgatgccgaaagcgcctaacgaagcacagatggaaacgttgctgaatactgttggttttatcggcgcacagacgggcttcccggcgattaatctgacggtgaccgatgatggcagcaccattcagggcaaagatgccgacatcatgatcatcggtggtatcccggacaaactgaaagacgataagcagatcgacctattggtgcaggcgaccgaaagctgggtgaaaacaccgatgcgccagaccccgttccccggcattgtgccggacgagagcgatcgcgcggcagaaacccggtcaacgctgacctcttccggtgcgatggcggcggtgattggcttccagtcgccgtataacgaccagcgcagcgtgattgcgctgttggcagatagcccacgcggttatgaaatgcttaacgatgcggtgaacgatagcggcaaacgcgccaccatgttcggttcggtcgcggtgatccgcgagtccggtatcaacagcctacgtgttggcgacgtttattacgtaggtcatctgccgtggttcgagcgcgtgtggtatgcgctggcaaaccatccgattctgctggcggtgctggcggctatcagtgtgatattgctggcatgggtactgtggcgtctgctgcgaattattagtcgtcgtcgtcttaacccggataacgagtaattgaagatgaatgtgttgcgtagtggaatcgtgacgatgctgctgctggctgcctttagtgttcaggcagcctgtacctggcctgcctgggagcagtttaaaaaggattacatcagtcaggaagggcgcgtcatcgaccccagcgacgcgcgcaaaatcaccacctccgaagggcaaagttacggcatgttctctgccctggcggctaacgaccgtgcagctttcgataatattctcgactggacgcagaacaatctcgctcagggttctttaaaagaacgtttgcccgcctggctgtggggcaagaaagagaacagtaagtgggaagtgctggacagcaattcggcctccgatggtgatgtctggatggcctggtcgttgctggaggcggggcgtttgtggaaagagcagcgttataccgacatcggcagcgcgttgctaaaacgtatcgcgcgggaggaagtggtgacggtgcctgggctgggttccatgttgttaccgggcaaagtgggttttgctgaggataacagctggcgttttaaccccagctacctgccgccgacgctggcgcagtatttcacccgctttggcgcgccgtggaccacgctgcgcgaaaccaatcaacgtttattgctggaaaccgccccgaaaggtttttcgccagactgggtgcgctatgagaaagacaaaggctggcagctaaaagccgaaaaaacattgatcagcagctacgacgctatccgcgtttacatgtgggtaggcatgatgcctgacagcgatccgcaaaaagcgcggatgctcaaccggtttaaaccgatggcgacattcactgagaaaaacggttatccgccggaaaaagtggatgtggctacggggaaagcgcagggtaaaggaccagtcggtttttctgccgccatgctgccctttttacaaaaccgcgatgcgcaggccgttcagcgccagcgcgtggccgataactttcccggcagcgatgcctattacaactatgtgctgaccctgtttggacaaggctgggatcaacaccgtttccgcttctcgacaaaaggtgagttattacctgactggggccaggaatgcgcaaattcacactaaacatattcacgctttccctcggtctggccgtcatgccgatggtcgaggcagcaccaaccgctcagcaacagttgctggagcaagttcggttaggcgaagcgacccatcgtgaagatctggtgcaacagtcgttatatcggctggaacttattgatccgaataacccggacgtcgttgccgcccgtttccgttctttgttacgtcagggcgatattgatggcgcgcaaaaacagctcgatcggctgtcgcagttagcgccgagttcaaatgcgtataaatcgtcgcggactacgatgctactttccacgccggatggtcgtcaggcactgcaacaggcacgattgcaggcgacgaccggtcatgcagaagaagctgtggcgagttacaacaaactgttcaacggtgcgccgccggaaggtgacattgctgtcgagtactggagtacggtggcgaaaattccggctcgccgtggcgaagcgattaatcagttaaaacgcatcaatgcggatgcaccgggcaatacgggcctgcaaaacaatctggcgctattgctgtttagtagcgatcgccgtgacgaaggttttgccgtcctggaacagatggcaaaatcgaacgccgggcgcgaaggggcctctaaaatctggtacgggcagattaaagacatgcccgtcagtgatgccagtgtgtcggcgctgaaaaaatatctctcgatctttagtgatggcgatagcgtggcggctgcgcaatcgcaactggcagaacagcaaaaacagctggccgatcctgctttccgcgctcgtgcgcaaggtttagcggcggtggactctggtatggcgggtaaagccattcccgaactacaacaggcggtgcgggcgaacccgaaagacagtgaagctctgggggcgctgggccaggcgtattctcagaaaggcgatcgcgccaatgcagtggcgaatctggaaaaagccctcgcactggacccgcacagcagcaacaacgacaaatggaacagtctgctgaaagtaaaccgctactggctggcgatccagcagggcgatgctgcgctgaaagccaataatcctgaccgggcagaacgcctgttccagcaggcgcgtaatgtcgataacaccgacagttatgcagtgctggggctgggcgatgtggcgatggcgcgaaaagattatcccgccgccgaacgttattatcagcagaccttgcgtatggacagcggcaacactaacgccgtgcgcgggctggcaaatatttaccgccagcaatcgccagaaaaagctgaagcgtttatcgcctcgctctctgccagtcagcggcgtagcattgatgatatcgaacgcagcctgcaaaacgaccgtctggcacagcaggcagaggcactggaaaaccagggcaaatgggcgcaggcggcagcacttcagcggcaacgactggcgctggaccccggcagcgtatggattacttaccgactttcgcaggatctctggcaggccggacaacgcagccaggccgatacgttaatgcgcaatctggcgcagcagaagtcgaacgacccggagcaggtttacgcttacgggctgtacctctctggtcatgaccaggacagagcggcgctggcgcatatcaatagcctgccgcgtgcgcagtggaacagcaatattcaggagctggttaatcgactgcaaagcgatcaggtgctggaaaccgctaaccgcctgcgagaaagcggcaaagaggcagaagcggaagcgatgctgcgccagcaaccaccttccacgcgtattgacctcacgctggctgactgggcgcaacaacgacgtgattacaccgccgcccgcgctgcatatcagaatgtcctgacgcgggagccagctaacgccgacgccattcttggtctgacggaagtggatattgctgccggtgacaaagcggcggcacgtagccagctggcgaaactgcccgctaccgataacgcctcgctgaacacacagcggcgcgtggcgctggcacaggcgcagcttggcgataccgcagcagcgcagcggacgtttaataagttgatcccgcaggcaaaatctcagccaccgtcgatggaaagcgcgatggtgctgcgtgatggtgcgaagtttgaagcgcaggcgggcgatccaacgcaggcgctggaaacctacaaagacgccatggtcgcatccggtgtgactacgacgcgtccgcaggataacgacacctttacccgactgacccgtaacgacgagaaagatgactggctgaaacgtggcgtgcgcagcgatgcggcggacctctatcgccagcaggatcttaacgtcacccttgagcacgattactggggttcgagcggcaccggtggttactccgatctgaaagcgcacactaccatgttgcaggtggatgcgccgtattctgacgggcggatgttctttcgcagtgatttcgtcaatatgaacgtcggcagtttctccactaatgccgatggcaaatgggatgacaactggggcacctgtacattacaggactgtagcggcaaccgcagccagtcggattccggtgccagcgtggcggtcggctggcgaaatgacgtctggagctgggatatcggtaccacgccgatgggcttcaacgtggtggatgtggtcggcggcatcagttacagcgatgatatcgggccgctgggttacaccgttaacgcccaccgtcggcccatctccagttctttgctggcctttggtgggcaaaaagactccccgagcaataccgggaaaaaatggggtggcgtacgtgccgacggtgtggggctaagtctgagctacgataaaggtgaagcaaacggcgtctgggcatcgcttagtggcgaccagttaaccggtaaaaatgtcgaagataactggcgcgtgcgctggatgacgggctattactataaggtcattaaccagaacaatcgccgcgtcacaatcggcctgaacaacatgatctggcattacgacaaagatctgagtggctactcactcggtcagggcggttactacagtccgcaggaatacctgtcgtttgccataccggtgatgtggcgggagcgcacggaaaactggtcgtgggagctgggtgcgtctggctcgtggtcgcattcacgcaccaaaaccatgccgcgttatccgctgatgaatctgatcccgaccgactggcaggaagaagctgcgcggcaatccaacgatggcggcagcagtcagggcttcggctacacggcgcgggcattacttgaacgacgtgttacttccaactggtttgttggcacggcaattgatatccagcaggcgaaagattacgcacccagccatttcctgctctacgtacgttattccgccgccggatggcagggtgacatggatttaccgccgcagccgctgataccttacgccgactggtaagttttcagatagcgcctctcttaatgccgctgcgatcgggtatactcgggcggcaatctgggatttccggggggagacaatttgcgcgtaagtcgctcgttaacaatcaagcagatggcaatggtggcagccgttgtcctggtgttcgtttttattttttgcaccgttttgctgttccatctggtccagcagaatcgctataacacggctacgcaactggaaagcattgctcgctctgtccgcgaacccttatcttcagctattttgaaaggcgatattcccgaagcggaagctattcttgccagcattaaaccggcaggcgtggtcagccgtgccgatgtagtgctgcctaaccagttccaggcgctgcgtaaaagttttattccagagcgcccggtgccggtaatggttactcgcctgtttgagctaccggttcaaatctcgctgggcgtttactcgctcgaacgtccggcaaacccgcagccaattgcctatctggtactacaggcggattccttccgtatgtataagttcgtgatgagcaccctctcaacgttagtgaccatttacttacttttgtcgcttatcctgaccgtcgccatcagctggtgcattaaccgcctgattttgcatccgttacgcaatattgctcgcgaacttaacgccatcccagccaaggagcttgttggtcaccaactggcattaccgcgtctgcatcaggacgatgaaatcggtatgttggtgcgcagttacaacctcaaccagcaattgctgcagcgccattatgaagaacagaacgaaaatgcgatgcgcttcccggtgtcggatttgccgaacaaagccttgctgatggagatgctggagcaggttgtcgcgcgtaaacaaaccaccgcgctgatgatcatcacctgtgaaaccctgcgtgatactgcgggcgtgctgaaagaggcgcaacgagaaattctgctgctgacgctggtggaaaaactcaaatcggtactgtcgccacgtatgatcctcgcgcagattagcggttatgactttgctgtcattgccaacggtgtacaggaaccgtggcacgcaatcaccttaggtcagcaagtgctcactatcatgagcgagcgcctgccgattgaacgtattcaactccgtccgcactgtagcattggcgtggcgatgttctacggcgatctcaccgccgaacagctttacagtcgcgctatttctgcggcatttaccgctcgccataaaggcaagaatcagattcagttctttgatccgcagcagatggaagccgcccagaagcggttgacggaagagagcgatatccttaatgcactggaaaatcatcagtttgctatttggttacagccacaggtcgagatgaccagcggtaaactggtcagtgcggaagtgttactgcgtatccagcaaccggatggcagttgggacctgccggatggcttaatcgatcgcattgagtgctgtgggctgatggttaccgtcggtcactgggtgctggaagagtcctgtcgattgcttgcagcctggcaagagcgcggcattatgctgcccttgtcggtaaacctctctgcgctgcaactgatgcacccgaatatggtggcggatatgctggaactgttaacccgctatcgcattcagccgggaacactgattctggaagtgacagaaagccgacgtattgacgaccctcatgctgcggtggcaatcctccgtccgctgcgcaatgccggagttcgggtggcgctggatgatttcggcatgggctacgcagggctgcgtcagctgcagcatatgaaatcgttgccaatcgacgtactgaaaatcgacaaaatgtttgttgaaggcttgccgggagatagcagcatgattgctgcaattatcatgctggcgcagagcctgaacttacaaatgattgccgaaggcgtggagactgaagcacaacgcgactggctggcaaaagcgggcgttggtattgcccagggcttcctttttgctcgcccactccctattgaaatcttcgaagagagttacctggaagaaaagtagctaccccaaactgattacaaaactttaaaaagtgctggtttgtgcgagccagctcaaactttttaacctttttgtttcaattatgatccaggtacatttctgtgatgttgtctgggtgttattttaaggccgcaggtaccccataaccttacaagacctgtggttttactaaaggacaccctatgaaaacctctctgtttaaaagcctttactttcaggtcctgacagcgatagccattggtattctccttggccatttctatcctgaaataggcgagcaaatgaaaccgcttggcgacggcttcgttaagctcattaagatgatcatcgctcctgtcatcttttgtaccgtcgtaacgggcattgcgggcatggaaagcatgaaggcggtcggtcgtaccggcgcagtcgcactgctttactttgaaattgtcagtaccatcgcgctgattattggtcttatcatcgttaacgtcgtgcagcctggtgccggaatgaacgtcgatccggcaacgcttgatgcgaaagcggtagcggtttacgccgatcaggcgaaagaccagggcattgtcgccttcattatggatgtcatcccggcgagcgtcattggcgcatttgccagcggtaacattctgcaggtgctgctgtttgccgtactgtttggttttgcgctccaccgtctgggcagcaaaggccaactgatttttaacgtcatcgaaagtttctcgcaggtcatcttcggcatcatcaatatgatcatgcgtctggcacctattggtgcgttcggggcaatggcgtttaccatcggtaaatacggcgtcggcacactggtgcaactggggcagctgattatctgtttctacattacctgtatcctgtttgtggtgctggtattgggttcaatcgctaaagcgactggtttcagtatcttcaaatttatccgctacatccgtgaagaactgctgattgtactggggacttcatcttccgagtcggcgctgccgcgtatgctcgacaagatggagaaactcggctgccgtaaatcggtggtggggctggtcatcccgacaggctactcgtttaaccttgatggcacatcgatatacctgacaatggcggcggtgtttatcgcccaggccactaacagtcagatggatatcgtccaccaaatcacgctgttaatcgtgttgctgctttcttctaaaggggcggcaggggtaacgggtagtggctttatcgtgctggcggcgacgctctctgcggtgggccatttgccggtagcgggtctggcgctgatcctcggtatcgaccgctttatgtcagaagctcgtgcgctgactaacctggtcggtaacggcgtagcgaccattgtcgttgctaagtgggtgaaagaactggaccacaaaaaactggacgatgtgctgaataatcgtgcgccggatggcaaaacgcacgaattatcctcttaatctcatcacttatgcccgcactcccttccccgagtgcgggtgtttgcgcataattgacccctgtgcctgaacttaccacctgggtgagttcaggtttatttcacttcttccgtgacattttcatgttcttgcggtctaacacgaagtgtttttaacgtcatttagactgaccgacaacgggcagtttttttattaccaggatagttgatcaggggttcacatgcagggcacaaaaattcgacttttagcgggcggtttgctgatgatggccactgctggctatgtgcaggcagatgcgctccagcctgatccagcatggcaacaggggacgctttccaacggtttacagtggcaagtgctgaccaccccccagcgtcccagcgatcgtgttgaaattcgcctgctggttaataccggttcgctcgccgaaagtacacaacagagcggttacagtcacgccatccctcgtattgcgctaacgcaaagcggtggccttgacgcagcacaggcgcgttcattgtggcagcaggggatcgaccctaaacgcccgatgccgccggtaattgtctcttatgacaccacgctgtttaatctgagtttgcccaataaccgtaacgatttgctgaaagaagcgctctcttatctggcaaatgccactggcaaattgaccatcacaccagaaaccatcaaccacgcgctgcaaagtcaggacatggtggcaacctggcctgccgatactaaagagggctggtggcgctatcgtctgaaagggtcaaccttgttaggtcacgatcctgccgatccgctgaaacaacccgttgaagcggaaaaaattaaagatttctatcagaaatggtacaccccggatgcaatgacgctactggtggtgggaaacgtggatgcgcgctcggttgtcgaccaaataaacaaaacgtttggcgaactgaaaggcaaacgtgaaacgccagctccggtgccgacgctttctccgctgcgtgcggaagcggtgagtattatgactgacgcggtgcgtcaggaccggttatctatcatgtgggatacgccgtggcagccgattcgtgaatcagccgcactgctgcgctactggcgtgcggacctggcccgcgaggcgctgttctggcatgttcagcaagcgttaagtgccagtaacagcaaagacatcggtcttggatttgactgccgtgtgctgtatctgcgtgcgcagtgtgccatcaacatcgaatcaccaaacgacaagctgaacagcaaccttaatctggtggcgcgtgaactggcgaaggttcgcgataaaggtctgccggaagaagagttcaatgcgttagtggcgcaaaagaaactggagctgcagaaactgtttgccgcctatgcacgagctgataccgatattctgatgggtcagcggatgcgttcgttgcaaaatcaggttgtcgatatcgcgccggagcaatatcagaaactgcggcaggatttccttaatagcctgacggtagagatgttaaatcaggatctgcgtcaacagttgtcgaatgatatggcgttaatactgctgcagccgaaaggcgagccggaatttaacatgaaagcgttgcaggcggtctgggatcaaatcatggccccatctaccgccgctgcgaccacctctgtcgccacggatgacgtacatcctgaagtgacggatattccacctgcacagtaatgcctgatggtgatgagttagcacaaccatcaggtatttatggatgagctggatagaggggtaacactttatccagccttttgcatatgctgcgtttacgctggcatcgcctcacgcgggataatcgcgccgcgatactgaataacggtacttgcggtcaggtgcccacgtttcgccgcgtcttccgcgctgccgcctgtcagacgtaccgccagataaccggcactgaaagagtcgccagctgcggtggtatcgatcactttttctttcggcagtttcaccgccggaacatccactaacccttcgccagcaatggacaccaggcaagaatccgccccgcgtttcaccaccacttctttcacgcccgcgttatgggtgcgcgcaatgacgtcttccaccggctgttgaccccacagcgcgtcttcgtcgtccagcgtcaggaaggcgatatccgtgcattccagcatttgttggtacacctgctgtgtctcttctttgctggcccacaggcgcggacgatagttattgtcgaaaatcacttttccgccgttggcgcggcattcgcgcagcagggaaagcagcttttcgcggctggtcgggcttaagatcgccaggctaatcccgctcaggtagagataatcgaaattcgccagctcttcgcaaatcgccgcagactgctcactctccagccagaatttggcggcggcttcgttccgccagtagtagaacgtacgctcgccggtgctgtcggtttcaatgtagtaaaggcccggcagacggttttccatccgttgggtcagggaagtatcaacgttctcgccgtgccaggcgtccagcatctgctggctaaaactgtccgttcccagcgccgttacgtaatgaacggttaatgccgcaggatcgacctgacgggcgatatagacggaagtgttcagggtatcgccgccgaaaccgcgcttaacgtccgcgcctttctcggaaagctcaatcatgcattcgccaatcacggcaatctttttggacatagtcgtgaacctgatctgtaaaaaattagcgttagtttgcgctgtggtggtttgctggtcaaccatattaaaacagtgttccattatttttttgagccagaacgtattcctgaaagattccgttgtggagtgaggaaatttaccccggccaggcggtaaagttctgcccttacgcgccgataatctttgtcgagtccgggcagcatcacttttaaacacaggacatctttgatgataaggcaggttatccagcgaataagcaaccctgaagcaagcatcgagagcttgcaggaacggcgtttttggttgcagtgtgagcgtgcttacacctggcagccgatctatcaaacatgcgggcggttaatggccgtggagctattaacggtggtcacgcatcccttgaacccttcgcaacgcctgccgccggatcgctattttactgaaatcaccgtcagccatcggatggaggttgtgaaagagcagattgatttgctggcgcaaaaagccgacttctttatagagcacggcctgctggcatcggtcaatattgatggccctacgctcatcgccctgcgtcagcaaccaaaaatcctgcgccagattgagcgtcttccctggctgcgtttcgaactggtggagcatatccgtctgccgaaagattcaacctttgcctcgatgtgtgaatttggcccgctgtggctggatgattttggtaccgggatggcaaatttctctgcgctaagtgaagtgcgttatgactacatcaaaatcgcgcgagaactgtttgtgatgctgcgtcagtcgccggaaggacgcacactcttttctcagcttttacatctaatgaatcgctattgtcgcggggtgattgtcgagggcgtagaaacgccggaagagtggcgtgatgttcagaactcgcccgcattcgccgcacaaggctggtttctttcacgcccggcaccgatagaaacgctgaatacggcggttctggcgctataagctgcctcattttccgcctggctggactatctttaggactggcacaggaagaatatgaggaagcgaacgatgagcaaggcaggcaaaataaccgctgcgatttcaggggctttcttgttgttgattgtcgtggcgatcattttgattgcaacttttgactggaatcgactcaaaccgactatcaaccagaaagtctctgcggagttgaatcgtccgttcgctatccgtggcgatctgggcgtggtgtgggagcggcaaaaacaagaaactggctggcgcagctgggtgccgtggccccatgtacacgcggaagacatcattcttggcaatccaccggatattcccgaagtcacgatggtgcatttgccacgcgtagaggcaacgctggccccgctggcgctgctgaccaaaacggtctggctgccgtggatcaagctcgaaaagcccgacgcgcgcctgattcgcctctctgaaaagaacaataactggacgtttaatcttgccaacgatgataacaaagacgcgaatgcaaagccgtcggcatggtcgtttcggctggataatattcttttcgatcaagggcggatcgccattgatgacaaagtaagcaaagcggatctggagatttttgttgatcccttaggcaagccgctgccgttcagcgaagttactggatcgaaaggtaaagcggataaagaaaaggtgggcgattacgtttttggcctgaaggcgcagggacgatataacggtgaaccgctcacgggtacgggaaaaataggcggtatgctggcgctgcgtggcgaagggacgccgtttccggtacaggctgatttccgctctggtaacacccgtgttgcttttgatggcgtcgtgaatgacccaatgaagatgggcggtgtcgatttacggcttaaattttctggcgattcactgggtgatctctatgaactgacgggcgttctgctgcccgataccccgccgtttgaaacggatggtcggctggtagcgaaaatcgacactgaaaaatcgtcggtctttgattatcgcggttttaatgggcgaattggtgatagcgatatccacggttctctggtctacaccaccggaaagccacgaccaaaactggaaggtgatgtcgagtcgcggcaattgcggctggcggacctgggaccgttgattggcgttgattccgggaaaggggcagaaaagtcgaaacggtctgaacagaagaagggcgaaaaaagcgttcagcctgcgggcaaagtgctgccttatgaccgcttcgaaaccgataaatgggacgttatggatgccgatgttcgcttcaaagggcggcgcattgagcatggcagtagcctgccgattagcgatctttctactcatatcatcctcaaaaatgctgacctgcgcctgcaaccgctgaaatttggcatggcgggcggcagcattgcggcgaatattcatctggaaggcgataaaaagccgatgcaggggcgggcagatattcaggctcgtcgactgaaactgaaagaactgatgcccgatgtggaactgatgcagaagacgctgggggaaatgaacggtgacgcggaactacgcggtagcggtaactcggtggcggcacttttaggcaacagtaacggcaacctgaaactgttgatgaatgacgggctggtgagccgcaacctgatggagattgttgggctgaatgtcggcaactacattgtcggtgcgatatttggtgatgatgaggtgcgggtgaactgcgcggcggcgaatctgaatattgccaacggcgtggcgcgcccgcagatttttgctttcgatactgagaacgcgttgattaatgttaccggcacggcaagttttgcttcggaacagctggatttgactattgatccggagagtaaaggaattcggattatcacactgcgttcgccgctgtatgtgcgggggacgtttaaaaatccgcaggctggggtgaaagccggaccgctgattgcccgtggtgctgttgctgcggcactggcaacgctggtaacaccggcggcggcgttactggcactgatctcaccttccgaaggggaggctaatcagtgtcggacgattttgtcgcagatgaagaagtgatgataattgccggatgtctgacatccggcaattaaacagatttagattgttggcaaagtgtgctttgttcatgccggatgcggcgtgaacgccttatccggcctacaaatccttgcgaattcaatatattgtatggaaattcaggcctgataagcgtagcgcatcaggcttttcactcttattacaacgactgatgtcgcgtctcatgggtcagcagcagggcgattaacgtcaagccagccatcgccgccagatataaccccaccgcacctagcccgtagttagtctgcaaccaggctgcgatatatggcgcaacggaagccccgagaatcgacgctacgttgtaagagaacgatgctccggtgtaacgcacttctgtcggaaacagctctggtaacagcgcacccattggcccgaaggtcagacccatcagacttaaccccagcagcaggaaggcaaaaaccagaatcgggttgccagaaccgagcagtgggttaaaggcgaacagcgcgaacaggatgatcagcgtggtgatgattaccatgcttttacggcgaccaaaggcatcagccagtaatccagcgactggcaccatcacgccaaaaccaataactgccatcatcaacatccacaacacttcgttacgcggcaggccaagcccaactggcgcggcggcggtactaaaggtcatagagtagaccgtcatgatgtaaaacagcgtataggttgccagcataatgaacgtacccagtacggttacgcgaacatgtttggtcagcagcgtacccagcgggatcttcacctgttttttcgctttagcgactttctcaaacaccggcgactcatgcagcgacacgcgaacatacaggccgataatgaccagcaccgccgagaagataaatggcacacgccagccccagctcataaactgctcgtcggtcagtagccaggaaagcagcaagaaagtgccattggcaaagaagaagccaatcggtgcgcccagctgcggaaaggagccatacagtgcacgtttgcgcggtggggcgttttcagtcgccagcagcgccgcgccgccccattcaccgcctaagcccagaccctgaccaaatcgagccagcgccagcagcagcggggcgaaaataccaatcgtggcatagcccggcagcagaccaatcaccacggtcgaaatccccatcgttagcaacgaggcgaccagcgtcgctttacgcccaacgcgatcgccaaaatgaccaaaaacggcagagccaatggggcgcgcgacgaaggcgatggcgaaggtggcgagcgactgtagcgttgctgccgtaggatcgccctgcgggaagaagatatgcggaaacacaataacggccgcagtggcgtaaatgtaaaagtcgaagaactcaatggctgtgccaatgagagaggcgacaaggactttattacgcgagttgatcggcgtgtattcttgctcgtggtcgagtgttgtggctgttgcttgcataatcttttcttattttttggctaacgaatagccatattacgcacagcaaaagtgatatttcaatgtgtaacaaatcgcggaaatggtcaaaaatcaggcaaaaaggggataatgtttaggccagtgatttttcttctatgaaatgcttcacataattttataaatagtggataaaactggtttcaggttaaataaaagttaccaactggatttatatgctggggttatgagttggaatgaaattgtttgctcccaaatagatggctgaagaggctctggggacgagtttcaagaggttatgtgcgcattatagccggatgcgatgctggcgcatcttatccggcctacggggagccaggccgaataaaatcgtatgccggataaggcgtttacgccgcatccggcctattttaaggctgcgttttccccggcattcgcgggtcgtctttatattcggcggtggcaatccacgccgcgcaaaacagcgtcaaacgggcgaagaagtagaaaaatgccatcagccccagcacggaaccaaatgctgcgccagagggggatttcatcaacgatggcagggtgtaggtcatcacgattttaatcacttcaaaaccaatagcagccagaaatgttccgcgaatcagggcttttttgcgcggacggtggcgcggcaaccgccagaagatccagaagaaaagcagatagttggcgaagatggaaatcgccaggccaatcaatcgccacgtcggtttcagccactcaatgctgttcaggtgcagggcgctaataatcatttgctgcgccgaaccggcaaccgaggtgatcgaaagcgtcacaatcagcgcaatcaacaaaccaatcagcgaaataaaatctcgcagatattttacccagaacttctcctgatcttgcggcgagcgttcccagacatcgcgcgactgggcacgaatcgcttcacgcaggttacccatccagttgatgccggaataaagtgccaccgccaggccgacaagccctacagtcgtacgctgctgaacggcggtgttgatggtgtttttcaacgtggcggctagcgtcggatcgctgatgttttgcagaattttgtcgaagatatcctgtagcaacatcggatgggaggccagcacaaagccccctgcggcaaacgacaccatcaaaattggtatcatcgacaaaaatgagaaataggtgatagccgcaccaaactggttacccagccgatcgttaaagcgttctgtcgcgcgaatcaggtgcgcaataaccggttggcgttggactttttcggcagtggtggtgacggtttccagcgcctggctaactttgctgcctttctcgctattatccaacggcttaatcggctcgtgctccagatcctggatgggacgtttgatctcgttttcctgcgtcatccgctcttttgtccttctgtcgtggtcattcttaaaaagtatagtcggtcagtccaggtactctttcattacgccagccagccactgcataaacaggtttacacgccgggaaagctcccgacgctgcggataaaccagcgaaagggagagcggctcggcacggtagccaggtaatacttcaataagccgcccggcacgcagggcttcgcgcacggcaatgcgcgggatctgaataatccccagaccggcaagaccggcggtgagatagttttcgctactgtttaccgtcaacatgccgccagacttaaaccactggacgccattaacgctggcaacctcaaaacctaacggatgtacacccaggtgcggtgtataacgcactattgcgtgtgaagtcagatcatcggggctttgcggataaccaaagcgcgtcagatagtgcggactggcacagttgaccatggtcagtttgccgaggggacgggcgataacgccatcttccggtaacgcgccagtgcgtatcacgcaatcaaaaccatcatgaagaatatctaccggacggtcatggctactcagttccagctcaattcccggatgcagatagagaaattccgacaggcgcggcagtaacaggcttttcgcgattcctggcgggatgtcgatgcgtaatttaccgctgatactggtggcatcctgttgaaacagaccgtccagttcgctgagattactcaacacatcttttgctcgttgataataggtcatgccttctggcgtgagtttgacccgtcgcgtggtgcgctggagaagctgggtgccaagttgatgttccagtgcctgtatctggcgcgaaacacttccctttggcaaagcaaagaaatccgctgcgcgggaaaaactttccagctccgcgactttgatgaacaactgcattgcgtgaattttatccatttctttgaccgattgttgttcacagcgaaacagtaacgcgcatatcgcattgtttattgttttttctaacatctaatgccgggtttcacaatgttgtcatgccgaatgtggcgatttctcagcaggaaaagggcggaatagctttctgagaaaggtgaatccccttaaacagagcgtatttttcagcgattccctttaaagtgaacagaggacgtgttggctatttgtgcttatttttgtctccttgccgtttgttattttggcttgtggtcgcggaatttcatttttaattgcatgcgtactaaccaccaatataaggaaatcctcaaaattgttttaaatagtgccctcgacatgtaatttcaggcgtttagctgtaactatttatatcggtaactattttctacacgtcatctctgtagaatggccaccgccaaatggcgaattcttattttttctcgcgggtaatacccttccactacttaagtctttttaacgtattcaggtggagattcagttatgcaaatagtcatgtttgacaggcagtcaatatttattcatggaatgaaaatcagtttacagcagcgtattccaggagtgagtattcagggggccagtcaggcagacgagttatggcaaaagctggaaagttaccctgaagccttagttatgctcgatggcgatcaggatggtgagttttgctactggttgctgcaaaaaaccgtggtgcaatttcctgaggttaaggtgttaattacggcgacggattgcaataaacggtggttacaggaagttatccattttaatgtgctggccattgtgcctcgtgattcaaccgtcgagacatttgcgttggcggtaaatagtgcggcgatggggatgatgtttctgcctggagactggcggacgacgccggaaaaggacattaaagatctcaaatcgttaagcgcccgccagcgggagattttaaccatgttagcggcgggcgaatcaaataaggagatcggcagagcgctgaatatcagtaccggaacggtaaaagcgcatctggaatccctgtatcgccgtctggaagtgaaaaatcgcacccaggcggcaatgatgttaaatatctcctcctgaagaggataattttacagccagcaggaagttagcggctggctgtaaaaatattatggttcgccgtacaaaccaattaaacggcgtaccacaccgttagtccagccaaacccatcctgcaacggatactcgccaccgccgccttcgcggggaacaccatcggcaatatggtatttttcgatcagtttgtgctgttccagatagaactgattcaccgtcttcagccagcttcgcgcgatttcatcacccagaaggtcatcgccgtacattttaaatccctgaatcgccatccattgtaacggtgcccagccgttgggtttatcccactgttcaccggtttcgtactcgcttgccagaatcccgccaggtgtcagtaaccgactgcgcacggcgtttgccagacgatcggcctgttcatggttcgccataccgacatagagtggcacaatggcggcagcggaaaacagcgccagttgttcgcgtcgccagtcgtaatcgcggtagatgccgttttcatcatcccagaggtaacggtttaccgcatcgcgacgggcactggctttctggcggaacagtgcttctgtctctttctcgcctttcagcgccgagatgttggcgatggcgctctccagtttaaacaggaaggcattcagatcgatggggatgaactgggtggtacgaatgctcgccagacgaccagtatcacgcagccaacgggaagagtaatcccaaccggaggccgcccccgcgcgtaaatcgcggtacacctcgttgggcgggcgaccagaatgtttcgcggtttcaacgtcctcaagccaggattcgtcacgcggcgtgtcgcgatcgtcccagtaacggttgagcagcgatccgtccggcatccgcacaacatggcgataggcctgattagggattaacgattctgcaccgtccatccagaaggcatattccattttaaggtggtcgagatagcggcgcgcaccgcgtacaccatcttcttcaaacaactccaccatcagcgcaaaaaccggtggttgcgagcggctcaaataataggtgcggttgccgttggggatgtgaccgtagttttcgatcatccaggcgaagttatcggccatgcatttcagcaaatcttcccgaccactttccgccagccccagcatggtgaaataggaatcccaatagtaggtttcgctaaaacggccgcccgggacaatatatgactgcggcagcgccagcagagaagaccacggaatgtgatcctgtggttcgcgggttagcaccggccacagctggtcgatatgctctttcagggaattttgcgggtccgatacatactcgctggagtagacctccggcagccagaagtggttttcaacaaacttgcgcaagtcaaaatcacgatgacggcgcactttacggtagcggattaagatatccagcgggtccattttaggtgcgcagtcgggaaaggttttactgtcggggaaaattttcgccgactgaacatgctcgaacagttcgagatagcgatcggcaggcgtcagcgcatcagaggcaggcagcccttcaatcatctcgggttccggttctgcctcgatcatctcatccagttttaattcatacgggtccagctcatagcagagatcgacttcgatcatcagttcgtctggattagggttttgaattttctgattgagcataaggatccaacctccgaaattcgtcgctaattatcggcttttctttaagggtagtcattcgctccgcctggtgggcgacaaagcgtgcggtggatcacgtttattaacctgtcaaaaaatataacgcactaatatcaatggaatttataaaaataccgatttggtgttgtttttcattttcagaacattcaatcctgctctcgccgcaatcatgatatgccattcctgatctgggtaataggcacaggctatcttattgatagtttatattcatgtaattgattgattcctatcaaaaagcgtatctccctgttttttatgatggctttgtctcgcagagacgtttgcagcattctggaaaattttctgggtcacaataactcaccaccgtgagggaagaataatgaaaatggtctcacgtattaccgcgatcggcctggctggcgtcgcgatttgctatttagggttatctggttatgtgtggtaccacgataataaacgcagtaaacaggccgatgttcaggcatctgctgtcagtgaaaataataaggttttaggctttctccgcgaaaaaggatgcgactattgccacacgccttcggcagaattacccgcctattattatattcctggcgcgaaacagttgatggattacgacattaagcttggatataaatcttttaaccttgaggccgtgcgtgcggcactgctggctgataaacccgtttcgcaaagcgatttgaataagattgaatgggtgatgcagtatgaaactatgccaccaacgcgttataccgcgctacactgggcgggtaaggtgagtgatgaagagcgggcggaaatactggcctggattgcaaaacagcgcgcggaatattacgccagcaatgatactgctccggaacatcgcaatgaaccggtgcagcccatcccgcaaaaactgcctaccgatgcgcaaaaagtggcgttgggttttgcgctgtatcacgatccccgtttatcggctgatagcaccatttcatgcgctcattgccatgcgttgaatgcggggggcgtcgatggcagaaaaacatcgattggtgttggtggcgcagttgggccgattaacgcgccgacggtatttaactcagtatttaacgttgagcagttctgggatggtcgtgcggcaacattgcaggatcaggctggtggaccgccgttgaacccgattgaaatggcgtcgaaatcctgggacgaaattattgctaagctggaaaaagatccgcagcttaaaacgcagttcctcgaagtctatccgcaaggtttcagtggcgaaaatattactgatgccattgctgaatttgagaaaacattaattacgccggattccccatttgataaatggttgcgcggagatgaaaatgcgctgacggcgcaacagaaaaaaggctatcaattatttaaagataataaatgtgcaacttgtcatggtggtattattctcggcggacgttcctttgaaccgttggggctgaaaaaagactttaactttggggaaattacggcggcggatattggtcgtatgaatgtgactaaagaagagcgtgataaattgcgtcagaaagtacccggtttacgtaacgttgctttaacggcaccgtacttccatcgcggtgacgtgccgacgctggacggggcggtgaaactgatgctgcgctatcaggtaggcaaagagctgccgcaggaggatgtggatgatatcgtagctttcctgcacagtctgaacggggtgtacacgccgtatatgcaggataaacaataattaatttgatcgcccgaacagcaatgtttgggcgatttttattacgataataaagtctgtttttaatattatcatgttaaatgtttatattataaaaagtcgtttttctgcttaggattttgttatttaaattaagcctgtaatgccttgcttccattgcggataaatcctacttttttattgccttcaaataaatttaaggagttcgaaatggaccagaagctgttaacggatttccgctcagaactactcgattcacgttttggcgcaaaggccatttctactatcgcggagtcaaaacgatttccgctgcacgaaatgcgcgatgatgtcgcatttcagattatcaatgatgaattatatcttgatggcaacgctcgtcagaacctggccactttctgccagacctgggacgacgaaaacgtccataaattgatggatttgtcgatcaataaaaactggatcgacaaagaagaatatccgcaatccgcagccatcgacctgcgttgcgtaaatatggttgccgatctgtggcatgcgcctgcgccgaaaaatggtcaggccgttggcaccaacaccattggttcttccgaggcctgtatgctcggcgggatggcgatgaaatggcgttggcgcaagcgtatggaagctgcaggcaaaccaacggataaaccaaacctggtgtgcggtccggtacaaatctgctggcataaattcgcccgctactgggatgtggagctgcgtgagatccctatgcgccccggtcagttgtttatggacccgaaacgcatgattgaagcctgtgacgaaaacaccatcggcgtggtgccgactttcggcgtgacctacaccggtaactatgagttcccacaaccgctgcacgatgcgctggataaattccaggccgacaccggtatcgacatcgacatgcacatcgacgctgccagcggtggcttcctggcaccgttcgtcgccccggatatcgtctgggacttccgcctgccgcgtgtgaaatcgatcagtgcttcaggccataaattcggtctggctccgctgggctgcggctgggttatctggcgtgacgaagaagcgctgccgcaggaactggtgttcaacgttgactacctgggtggtcaaattggtacttttgccatcaacttctcccgcccggcgggtcaggtaattgcacagtactatgaattcctgcgcctcggtcgtgaaggctataccaaagtacagaacgcctcttaccaggttgccgcttatctggcggatgaaatcgccaaactggggccgtatgagttcatctgtacgggtcgcccggacgaaggcatcccggcggtttgcttcaaactgaaagatggtgaagatccgggatacaccctgtacgacctctctgaacgtctgcgtctgcgcggctggcaggttccggccttcactctcggcggtgaagccaccgacatcgtggtgatgcgcattatgtgtcgtcgcggcttcgaaatggactttgctgaactgttgctggaagactacaaagcctccctgaaatatctcagcgatcacccgaaactgcagggtattgcccagcagaacagctttaaacacacctgataacataacgttgtaaaaaccgaatgcccagcctttaaaaaaacagctgggcattcggttgcttattaatcgcaataatatattggctgtctattcatcgtgttgataagatatatgttatatgaatgtttattaaatgtagcgattacctttaatgtcacgaaaagggattatttgcttactattaatttccctgtgttcttaaacacgtttttgtattataaatccagtcatcctgcccgtagaacatcacacattatcatcctgttctcccgcttcgtttaaatttatttatcaatcaatttgacttaagagggcggcgtgctacattaataaacagtaatatgtttatgtaatattaagtcaactatgcaatcactacatgggaattgtctaattgcgtatgcaagacataaatatattctcaccatggttaatggtgaatatcgctattttaatggcggtgacctggtttttgcggatgcaagccaaattcgagtagataagtgtgttgaaaattttgtattcgtgtcaagggacacgctttcattatttctcccgatgctcaaggaggaggcattaaatcttcatgcacataaaaaagtttcttcattactcgttcatcactgtagtagagatattcctgtttttcaggaagttgcgcaactatcgcagaataagaatcttcgctatgcagaaatgctacgtaaaagagcattaatctttgcgttgttatctgtttttcttgaggatgagcactttataccgctgcttctgaacgttttacaaccgaacatgcgaacacgagtttgtacggttatcaataataatatcgcccatgagtggacactagcccgaatcgccagcgagctgttgatgagtccaagtctgttaaagaaaaaattgcgcgaagaagagacatcatattcacagttgcttactgagtgtagaatgcaacgtgctttgcaacttattgttatacatggtttttcaattaagcgagttgcagtatcctgtggatatcacagcgtgtcgtatttcatttacgtctttcgaaattattatgggatgacgcccacagagtatcaggagcgatcggcgcagagattgtcgaaccgtgactcggcggcaagtattgttgcgcaagggaatttttacggcactgaccgttctgcggaaggaataagattatagagttttactcagacataaaaaaaacccggcataggggaccgggaagaggatagtctgccgtctccagactaataaaccgttataacactccctgttggcacgggaaactttgtgctctcagtaagttaaatataacttttactggaaataagatcagccatttttttataaacataagctatacgctgtgcgaaaatatattcgtgctgcatttacttattatcaattaactgttatgcaaaactactttgtggataaattttggtcctaccaaatctggcagtttttgcgctaagaaacagtctggcatcatttcattagtatactgaaattgaaataatcgcagtatgaaatataagggataatcatgactcatgtctgctcggtgatcctcattcgtcgttcattcgatatttatcatgaacagcaaaaaatatcgctgcataacgagagtattctgctgctggagaaaaatttggcagacgattttgcgttttgttcaccggatacgcgacgactggatatcgatgagctgacagtttgccattacttacaaaatattcgtcagctaccacgcaatttagggttacacagcaaagaccgtttgttaattaaccagtcaccccccatgccgctggtgacggcgatttttgatagcttcaatgaatccggggtaaattcaccgatactgagcaatatgctctacctttcctgtttatcgatgttttctcataagaaagaactgatccccttacttttcaatagcatcagcactgtttcaggaaaagttgaacgccttattagctttgatatcgccaaacgttggtatctgcgcgatatcgcggaaagaatgtataccagcgagagtctaatcaaaaaaaagttgcaggatgaaaatacctgtttcagtaaaatattactcgcctccaggatgtcgatggccagacgattactcgagttacgtcaaattcctctgcatactattgcggaaaaatgtggctatagcagtacatcgtactttataaacacatttcgacaatattatggtgtaacgccacatcagtttgcgcaacattcgccaggtaccttttcctgacatatttcgcatttgaatattggtcaggatctcacacctgcttcatgtgaaactcttccctgatgatttctgccgggctaccggctagttctctttcgcagtttgccaggcggtatcggtattttcaggaggaaaagactcggcatgtttgggattattaagctgacaattcatacgattacgggaatgtgggtcagtattgtgttgttcaaattgatgacgaatggctggagtggtttctactttcagtgctgtgtactaagcctggtattcctgacggttagctggttgttgagtggtgaatggttagcaggaaagagtaaggctgaaccttcatgttcaaccttactctcatttacacgttacgcttttttaaagcgggcaaagagatgttccactacaacgaaaaagaccggaacgaagtaaattgccagcactgttgcggcaaacatcccgcccatcacgccggtacctaccgcgttttgcgcgccagaaccggcaccatgactgataaccagcggcagcacgccgagaataaaggccagagaggtcatcaggattgggcgtaaacgcatccgcgccgcttcgatgattgcctctatcggcgttttcccttctttctgcatcatctcaacggcaaattcgacaatcaggatggcgtttttggcggaaagcccgatggtggtcagcaaaccaacctggaagtagacgtcattacttaagccgcgcagatcggtggccagtaatgcgccaacgacgcctaacggaacaaccaacatcaccgagaacggaattgaccagctctcatagagtgcggcgagggcgaggaacaccacgaccagtgaaatcgcatacagcgcaggagcctgatttgaggataacgcttcctgatacgatagtccggtccatgagtagccgacgcctgccggaagtttagcgaccaggtctgccataaatttcatggcgtcaccggtacttttcccggccgccgcttcacctaaaatctccattgacgggatgccgttgtagcgttccagtcgcggtgaaccataggtccattcggtagacgagtaggcagaaagcggtgccatcgtgccagaggcgttgcgtacataccattggttgatgttatccggcaacatacggaacggcgtgcctgcctggacatacacttttttcacccgcccctggttgaggaagtcgttcacgtagctgctgccgaaggcggtggaaattgtctggttgatatcagacagcgccacgcccatcgcttcagctttcgcagcgttgacgttcactttgaacatcggcgtatcttccaggccgttcgggcgtaccccggtgacctgattcggtgattgcgctgccagtgataacagctcgtttcgcgcctgggttagtttttcgtgccccaggttaccgttgtccagcagttccatatcaaaacctgacgcggtacccagttcagccaccgcgggtaagttgaacgggaagacgacggctttattgatactgcttaacgcaatcattgcccgctgaatgatcgcggtaaccgagttttcctcaccgacacgttcagaccacggcttgagactgataaacgccaggccgttgttttgcccctgaccgctgaagccaaagccgccaacggtaaacaccgactggacattatctttctctttagtcagataataatccgtcacctgttgcagcactttcgtggtgttaaccatggtggcaccggaaggtaactgcgcggtggtcataaataccccctgatcctcttctggtaagaaagaggtcggcgtgcgcaggaacagcaccgccatcccggcgcaaatcagcaggtagaccaccatgtagcgaccggtacaacgcaacagcgagcgggtgctatcggtatagtgttgagttgatttttcaaacagcgtgttgaagcgtgcgaacagggcgttaggtttgtgaccgccttccggcgcggctttcagaatggtggcgcacagggcaggggtcaggctcattgccacaaatactgaaagcagcatggaggagatcagcgtgatggagaactggcggtagatctccccggttgcaccgctcataaaggccatcggcataaacactgcggaaagaacaacggcaataccgaccagcgcacgttggatctgccccatcgatttatgcgtcgcttccttcggcggtagcttatcttccgcaatgacacgctcgacgttctccaccaccacgatggcgtcatccaccagtaaccctatcgccagcaccatcccgaacatagtcaacgtgttgatggtgaaaccgaccgccgacaagatcgcaaacgtcccgagaataaccaccggtacggcaatcgtcgggatgattgtggcacggaaattctgcaaaaacagatacatgaccaggaagactaggatgatagcctcaaccagtgttttgaaaacttcctgaatagaaatttcgataaacggcgtggtgtcgtaaggataaaccgtcttcagacttgccgggaaataggctgataagcggttcagttcctctttgactgcccgcgaggtatccagggcgtttgctccggcagccagtttgatggcgatcccggcagcaggtttgccgttatagcgtgccacggtggaataatcttccgccccaagttcgacgcgagcgacatcacgcagcagcacttgcgaaccatcttgctgaactttcaacaggattttgccaaattcttccggcgtttgcagacgcgtctgcacaatgatcgaggcgtttagctgctggtctgccgcctgtggcatgccacccagttgaccaccggaaatctggttgttttgcaccttaatctgggaaataacatcggaaggtaccaggttatatttattgagtttttgcgggtccagccagatacgcatggcatactcggaaccaaagagttgtacgctaccaacgcccgcggtacggcttagcgggtctttgatattagacgctacatagtccgcgatatcgtactggttgaggctgccgttatcagaaataaacgccgctaccatcaggatattactgctcgacttatcgacgctaatcccctgctgctgcactgcttcaggtaatgaaggcatagcgagttgcagtttattttgcacttgaacctgtgcgatatcaggagatgtcccagtctcgaaggtcagagtgatagaggcattgcccgccgcatcactggttgaagacatgtacatcaggccatcaagcccattcatattttgctcaatcacctgagtgaccgagtcttctaccgtttgcgcatcggcacctggataggtagcgctgacggtaatggtcggtggcgcaatctgcggatactgcgcaaccggtaagttcatgatcgccagaccacctgcaagcatcataataatggcaagtacccaggcaaaaaccgggcgatcaataaaatagttagccatgaaagtccccttaagcctgcaacgttattgtttcgattcggtgctggcgttttcctggctggaggaaattgctcgtgctttgatacccggacgaatgcgttgcaaaccggaaacgatcacccgatcgccagcctgcaagccagaggtgacgacccactggtcgccgatggctttgctggcttcaatttcgcgtagctgcacgacatcgtctttatccagaatgagcgccgttgctttaccctgggcgttgtgggtgacgccttcctgcggcaccagtaatacattctggcggctaccttcatccactaatgccgtgacgtacatgccaggcagcaagtcaccatttgggttggggaaaatcgcccgtaacgtcacggagcccgtggtttcatccactgtcgggtcggagaatttcagcgtgccggtctggctgtagcgtttaccattttccagattgagctgtactggcgtactgccctgaacctgtttgatttgcccactggcgacctcttctttcatgcgtaagaaatcttgcaccgactgcgtgagatcgacataaatcgggtccagacgttgtacggtaaccagcgaatctgcctgattagcggtaacgagtgcgccgacggtcaccgacgatttcccgctgacgcccgtaatcggcgaggtgacattcgcgtattgcagattgatcgtcgcctgttcaacagccgctttggcgacggtgacattggcttctgcttcattcaactgggtgcgcgcggtgtcgtaatcctgacggctaacgtagttggtcttcagcaacgatgcctggcggttaaaggtgatgcgggcattgctggcggtagagagcgctttcgccagcgagcctttggcggagtttagctcggcctgtaaaggtgcaggatcaatctgatacagcgaatcgccctggttcactttatcgccttcgataaagttgcgtttaatgataataccgcccacctggggacgtatctcggcaacttcataaggaacggttctaccgggcaattcgctcaacacattgaccgaaccgggggagagtgtgacgacaccgacctcaggcgtcatggcggcggcgttttccgccgatttgtcatcgcaggcggtgagcatcgcgccgcagaataacaacggtattaacagctttcttcttctgttcattttagtccctgaaaattcttgagaaataacggttctttaaattgcgcgcgaggagagatatgagggatttacagaccagcggcatagtggggttgtcagccagtaaggtgggatacaggcacagtgatcgacatggtgaggtcaacgacaaaaaaaatgttgccgttctgccaacagttcctgccagcattcgggcaacgaagggttctactggtggatacacataccaggggaataaagtcgttttagcctctcctttagtaatcaccgggggtaatgaaatcagcatctgcatccctcgtcatgccagccatcaatttcagttgcttatgtcctgactaaaaataagatgtgatacccagggtgacgatgtcgctcatacgtcttagtttcagcttgtacataatgttgaatttctgaatctttaatgtttgttgcgaaatattgagcgtcgacgtgatattgctttcatttttatttttcagaatcagttgcataattttgaactgattatgtgaaaaacataattgtgaattcttatggggcaagtgtttaccataagtaatctcaagaagatttttgatactttctttgcggctaacaaaataaataggcgctttagcttttagtttactgatgtgataaggtgccaaaacaataattctctcggcatctaatttctccagaaatttaatcgcttcttcatcaaggatatgattgtgataggtatcaatgataaccttgaagggtttattgcctacttttttgatctctgacagggaattgatttttatcatttcgtgattatctttcaactgccaaaagccctgtaaaagaaaagaatctttcgtcatgagaaaaatcataacttgctccttagccgttatcgtttcgaatatgtcatccttttcattatttacatccttgtccgaatcgttgttcaatatagtaaacgcctataagaactttacccttcgtgaactaatacgtctattaacactaatcaatacttcagatttatccatcacgcactccatatattgatcctaagtaagattcctggttgttatcagcttgtaaatagcaaacaaaaagttaacgtttgcggattactgcccaagaataagttatcaataaccagtttgtgatctctgaagaatattactaaagttaaaatgtaatccgatttaaatatcgagtctccttgtttcgacttaagctggcaattggattgccagctttcttttaacgcattgaaattacctgagtaaataacgcattcatgtcttcaggtttttatatagcgtctggagacacggatatttatgcaatgtaatcaacgccagttgcaaaaaaatgaacccggattacttatttaaccgcccatagcatcaacgcttacggaactctttgttcactttcccacagcacttttaaaacattaaacctgactacggaaaatatcagccatgataatgtttgaaatggctaatttgccatagagtgaaaaaaattagatgaaattcagtaggttgaaataatcactagcaggtaattatttcaatgatagtgcgcaattgatctacaacactgcgtagcggagagagtattaatcggatcatagtcacatcaagtgactatgatccgggtgacaaccggggtaattattgctgcttaacgaacaaactggcgaagctgaacaggctggcggcgctaaatatcagttcaattcccaccagtgtggaaaccagcgttacagacaccatcggcgttgcaccaaggaatatccaggcaatgacgatatccagcacaccaataacgagctgtagccagctgcctttcattgaacgctgacgataccaactcatcaggcgaataacccctgcaacacagaacaaaccggcaataaatgccgcaatggcaaaaatgcccagctccggtgcgcggatgaagaaatagccgatcaataaataggcgactgcgacgaggaaaccggataataccggccagaaattatgactgcggttgctgaataacccgacaataagcgcaatacccgagcagattaataatgcacccactactgtgcttaaaatatcgccagagacgaacgggaaactgatacacagcaacccgacgataaacagcagcacggcaataaactggattgctctgcgatgttttttaagcatctccagatcaaacttcaaaattgttgccttatctatatataacatagaaccaccctataaaattaagaagaaaatcccctgctatcaatctatgccaaaaacgcgtctaagaatgcagtcgatttaataaaaatttcctaattgcagtatctgatgcatctgtaactcattgtattgaaataaaaatatctgattttgatattttccatcaacatgacatatacagaaaaccaggttataacctcagtgtcgaaattgattcgtgacggctctttcactttatagttgaggatattacgatgaaaaaagtattaggcgttattcttggtggtctgcttcttctgccagttgtgagcaatgcagcggatgcgcaaaaagcagctgataacaaaaaaccggtcaactcctggacctgtgaagatttcctggctgtggacgaatccttccagccaactgcagttggttttgctgaagcgctgaacaacaaagataaaccagaagatgcggttttagatgttcagggtattgcaaccgtaaccccagctatcgttcaggcttgtactcaggataaacaagccaactttaaagataaagttaaaggcgaatgggacaaaattaagaaagatatgtaattccgggaatgcgttacatcgtacttccttgcatattgaacaggccggaatatcttctttaaaagcagctattcctcctgttcatatataatctctatattgaatgggttacaaaatgaatatttcatctctccgtaaagcgtttatttttatgggcgctgtagcggctttgtcactggtgaacgcacaatctgcgttggcagccaatgaatccgctaaagatatgacctgccaggaatttattgatctgaatccaaaagcaatgaccccggttgcatggtggatgctgcatgaagaaacagtatataaaggtggcgataccgttactttaaatgaaaccgatctcactcaaattcctaaagtgatcgaatactgtaagaaaaacccgcagaaaaatttgtataccttcaaaaatcaagcatctaatgacttgccgaattaatgaggtgcaagtaaaaaggagtagcaagttgagccatcttgctgctcctttttgcatttttatatgacagcagaatttattatacgtcttatactcgcggcaattgcctgtggcgctattggcatggaaaggcaaatgcgcggcaaaggagcagggttacgcacacatgtattaattggcatgggaagcgccctgtttatgattgtttcgaaatatggttttgctgacgtgctgtctttagatcacgtcggactcgaccccagccgtattgctgctcaggtggtgacgggcgtcgggtttatcggtgcaggtaacattctcgttcgtaaccaaaatattgtaggtctgacgacggcagcggatatctgggtgaccgccgccataggtatggttattggcagcggtatgtacgaactgggtatttatggttcagtgatgaccttgttggtgctggaagtcttccatcaattaaccttccgcctgatgaacaaaaattaccatttacagctgacattagtgaacggtaatacggtatcaatgctcgactggtttaagcagcaaaaaataaaaactgatttagtttcgttgcaggaaaatgaagatcatgaagtggtcgccattgatatccagcttcatgccacaacgtcgatagaagacctgttgcgattattaaaaggtatggcaggggtgaaaggcgtttcaattagctaatctgtgtggcagcgtagccagactcaccgtaagcctgaaattcacaccagataatcaatatgctgatggcgtaccagctcattgatccgcttaagattgaggatcatcatgatattgtgtttatggcagtagaacgtttttagcgatattttcagtttctccagaatatcttccgttgtcatttgattcgcaatgcagctcagaacctgatgttgcttgcgcgaaagtgacacagccgcttcaggcacagagcagtaactgccattgatgagtgcgacaaaatcaatgatagtgatagtccgcggaacaaaggtcaccggcactttccccaggcagcgtttaatattaaagggggagaaaataatgacatggacaggttttaatcgttcaatttgagtgagaaaattagaatgaaatacattattcattaatgtatcaataatgacgaaggcattctgatgcaacattacgtcgatctcttcttcgttctgtatatgaacgacattacctttactcagaatgtttttcatcgcggtgaagaacatcgtatccctggtaattataagaaacataaccgactcctggtgcggacattaactttataatcagtttgccaaaggtaattaacaggacagggcttataataataatagttagcttactgtgtattaatttgatgtaatgcatgatgcagatgctgagaaagcatctgcatctttcggtggtgttatttgaccagctcaggtgttacctgactcaccgcattggtgtagtaaggcgcaccccagcccggttccggccagaatgcaccatagccgtaatcccacaggttataggtggtattaaccacttctctcaaatgccacacctggatgccctgcatattcacttccaggaagttatacgggactttattgataaagccaggttgttcaccctgaatggtgccgaggatggtaacaaagtgattacgatagttcactggatcaaggaagccgctttgtctggcgagcagtcggccctgatagttggcttcaatatcaggcttcgcatagctatccaacggtaatacagagatttctaacaacgtatccgttttgccattgataacgttgataaccttcccaccaaagcgcgcttgttgaccaacatataaccccggctggttatgaacagcaacaaaacttttttgaatatcaggttggttattgcctttgatattttgcggaattgaactacatgcggcaagcaaaaatgaaaggctgaggatgagtgcaccttttgtcatgttcatgttactatccttatcaacaaatattaaaaccataatagatatttctttatagttttcatctgattctgaggtgatatgcctgatagtaacgtaaacctgtctgatgtttatatcctttctgtttaggtgaactcagttaattttggggcgtgacatgaatatccatcaccccataatatagtgcattgttttaaaagtacataaaatctatttttattcaatgattataaagtgctaataatcaatattatggtattatattctggtaatgatttgataagcgaattcttttaccagatggtatttctatttccaccccataatttatatctttttcattaggcagtggcctctttaaataaggcgtgtgtgacattttttttgggttaagcgtctcgtattgaaatacttcgaattgatattcagacatttctgcccatgtttgaattttattgtatcgggagagtgtcgtaaaggctttaacttgcttataacattgtctttggaattcttgctgatattttaatatgtcattgtatgaaagattggttatcctggcctctaaaaatttaattattgtcgaagcaatttccgcttttgctcgtaaaaggttgtcattaatggttaataatgttgaaaataaaccttcgatttgtttgtcaagatattgtccatctttatataatttgggggtagggtgttctttatgtaaaaaaatagtgtcacctaaggaaggtgcgaacaagtccctgatatgagatcatgtttgtcatctggagccatagaacagggttcatcatgagtcatcaacttaccttcgccgacagtgaattcagcagtaagcgccgtcagaccagaaaagagattttcttgtcccgcatggagcagattctgccatggcaaaacatggtggaagtcatcgagccgttttaccccaaggctggtaatggccggcgaccttatccgctggaaaccatgctacgcattcactgcatgcagcattggtacaacctgagcgatggcgcgatggaagatgctctgtacgaaatcgcctccatgcgtctgtttgcccggttatccctggatagcgccttgccggaccgcaccaccatcatgaatttccgccacctgctggagcagcatcaactggcccgccaattgttcaagaccatcaatcgctggctggccgaagcaggcgtcatgatgactcaaggcaccttggtcgatgccaccatcattgaggcacccagctcgaccaagaacaaagagcagcaacgcgatccggagatgcatcagaccaagaaaggcaatcagtggcactttggcatgaaggcccacattggtgtcgatgccaagagtggcctgacccacagcctggtcaccaccgcggccaacgagcatgacctcaatcagctgggtaatctgctgcatggagaggagcaatttgtctcagccgatgccggctaccaaggggcgccacagcgcgaggagctggccgaggtggatgtggactggctgatcgccgagcgccccggcaaggtaagaaccttgaaacagcatccacgcaagaacaaaacggccatcaacatcgaatacatgaaagccagcatccgggccagggtggagcacccatttcgcatcatcaagcgacagttcggcttcgtgaaagccagatacaaggggttgctgaaaaacgataaccaactggcgatgttattcacgctggccaacctgtttcgggcggaccaaatgatacgtcagtgggagagatctcactaaaaactggggataacgccttaaatggcgaagaaacggtctaaataggctgattcaaggcatttacgggagaaaaaatcggctcaaacatgaagaaatgaaatgactgagtcagccgagaagaatttccccgcttattcgcaccttccctaaatttgcgtcagtgaaatttatattaagtagatcttcgaaataaaaccttgacaaggttagaacgaacccggacaggttctgtcctgtcatattgaaatcaataaagttggttccggcaaagactttcatcctgtttttattttcactgtgctcaatatataacttcgtcattttttgatacaggctttgaatatcttttatattagttggtaagtcagctcgttgttcagcaataaaattagtatctgaaaacatggtttggacactgaatgttatgggtattccctcttctacgctaattttagttatgattgccttgtcgggtttaggattagcgataacaatgattcgacattcagcacttttgtttttttcatatctaatgttattaatctgattaagtattgattgtgtctgttgcgtaagttgtgtcgaacttatcgtttcaatgttagtaataagacttacaagttgagccacaacttttgagtagtctgcatttgtatatgtagtgttcgtgtggcacgcattaatttgttgaagttggtgttgcgctaaatcatattgatcagagatatatccttctccagagaatgtggaattaatgggttgttgttcttcccaattatcgcaaggccacttcggtgtgtctggcgttttagcattatcggtatttgttgtgcagttataaatatcgccgtgatatgtatttattatacctggggtaaagtcaattgacataaaattccttattcatcatttgttttatgctaagatgtttaaattggataattagaacaggaatggattttcttctacacacaataaatgtaatgcgttatatcttcctgatataattacctttgatttcccttttatctccacccggtaatatttgtgtgtaaaaaaagggtagtgatagtatcgtaaaggaaatcgttaacaactatcaaaatgcgctcattttaaaaagttattatgttctctgatagtgtgtgaagtgattttttttgtgatgttttagatgtgtaataataaaatgggttaaggtatcttataattatttaataatttgttgtgtaaaccactgataaatcataatccagtacgtctttaaactactgcgctgtatcgctgataactaagcagctcactgatacaccatgctggacgcgataattggaatctcacgcagggagtactgtgtaaatagcaaaatcgcctgatgcgctacgcctgtcaggcctacaaataacatactattcatcgaattttcataactttgtaggtcggataagacgcgccagcgtcgcatccgacataaataaagcgcacttttctaacaacctgtgggggggatatcgccgctttatttcaggcgcttacccgcttcatcaaccactttctcgccatcttccttggagaatgcgcctttttgcgcatctggcagaatttccagcaccacttctgaagggcggcacaggcgagttcccagcggcgtcaccacaatcgggcgattaatcagaatcgggtgctgaagcataaagtcgattaaccgatcgtcagtaaatttatcttccgcaaggcccagctcctcatacggttcgacgtttttacgcagcagcgcgcgtacggaaatccccatatcggcaatgagtttgaccagttcatcgcgcgttggcggagtttccagataatggataatagtcggttctgtgccgctgttgcggatcatctccagcgtattacgcgacgtgccgcaggccgggttgtgataaatggtaatgttgctcatatcagtatctcattacaaagtgaaagagagacgtagcgccagcgcagccagcgtcacaaacagcacaggcagggtcatgataatccctgtacggaagtaatatccccagctgatagtcatattcttctgcgaaagtacgtgcagccagagtagcgtagccaggctaccaattggggtaattttcggtcccaaatcgcagccaatcacattggcataaaccatcgcttctttgataacgccagatgccgtgctgccatcaatggacaacgcgccaaccagtaccgtcggcatattgttcataatagaagagaggaaggcggtgaggaatccggtgccgagcgtcgcggcccacaggccgttatccgccagcacgttgagtacgccagaaagatattccgttaatccggcattgcgcaggccataaaccaccagatacatgccgagcgagaagatgacaatctgccagggggcaccgcgcaggactttacccgtattaatcgcatgaccgcgtttagcgacgacaaataatatcagcgcgcccacagctgcaatggcgctcaccggaatgccgagcggttccaggacgaaaaatcccaccagcagaagcagtaaaacaacccagccagttttgaacgtagcaggatctttgatcgcttctgcgggagatttcagcagcgccatatcgtagttctgcggaatatctttgcgaaaatagagatgtaacatcaccagcgtggcaacaatcgcggcgatatccaccggcaccatcaccgaggcgtattcgcgaaagccgaggccaaagaaatcagcggaaacgatattcaccaggttggagacaataagcggcaggctggcggtatcggcaatgaatccggccgccatcacgaacgccagcgtagtgcctttactgaaccctaaagccagcagcatggcgatgacaatcggtgtcaaaataagcgccgcgccatcattggcaaacagggcggcaacggcagcaccgagcaggacaatccaggtaaacagcaagcgaccacgaccattaccccagcgtgagacgtgcagcgccgcccattcaaaaaagccggactcatccagcagcaggctgatgataatgacggcgataaacgcagccgtcgcgttccagacgatattccacaccaccggaatatcacccggatggaccacgcccgtaactaacgccagtactgcgccgagcgttgcactccagccgatgcctaaacctttcggctgccagataaccaatacgatggtcaggacaaagatagcgcctgccagtaacataatgcctcccggataaaacacatctgaaaattcatatgtgtttagctaaatttttaactgcaaatgttcttactgtccccggaacagttttgtcgagccaggttgcggacaatcgcctgaaccttttcctgttcacatcgccaggcctcatcaataattttcgccgcccatgctggaatatgcggtgataagcggtaatgaacccacttaccttgcttgcggtccagcaatagcccgctttcacgcagcaatgccaggtggcgggagatcttgggctgcgactggtcgagagcagtgcagagatcgcagacgcataactctcccagttcgctgagcagtaaaacgatgcccagacgggtttcatcagcaagaattttgaacaattggatgggtaacagaaatgacatattgcgctcctgattgttgcaggtagtgtctctcttcgaagcggataagtcaaaaacatatatgacttaacgaatgtgtaagtgcagaggaaggtaataggtgtgaattttgagttggctattcatttgaaaggaggtctgaatcaggacgtaaaaaaaccgactttgcgtcggttttttactttccagccctgagttggtggctctggctggagtgagagagttcttatctaacagctcaatactattagccagtggctaacattgcaagaattagcgatttcttcagctggcggagggagcacttcggtatatatcgcagtgacgatttatatactttcactgggtcatcgtcatattaagccttgtccgaatccggatgtaaaaaaaccgactttgcgtcggttttttactttccagccctgagttggtggctctgactggagtgagatagccatcatctaacgcatcaatgctaataccatactgaaactattgcaaggacgtgctggttttataacctgcatgtactgtatgattatccagttagctctgaggcattttcactctggcaatgcgcataaacgctttcaaagtcctggtcagaagtacgggtggtgccgttaactgatgctctggccggagtgagagagttcttatctaacaatgagacatgcgccgtgacaggcagtggatgagtaagcggatgcattctcactccatcgcatggagaaaacgggtgattgataaagcaatcatcgttctaggggcgttaattgcgctgctggaactgatccgctttctgcttcagcttctgaactgatagcggaaacgtaattaagggctaagagcacactactcttagccctttaacatttaacgcattgtcacgaactcttctgccgccgttgggtgaatggcgacggtattgtcgaagtcttttttggttgcccccatcttcagcgccaccgcgaagccctgcaacatttcgtccataccaaagccaatgccgtgaataccgacaatcttctcttccgatccaacgcacaccagcttcatgcggcacggctggcggtgagtggtgacggcggtatacatcgcggtgaaagaggatttatacactttcacctgatcgtcgccatactgctcgcgcgcctgcggttccgttaaaccaacagtaccaatcggcggatggctgaagaccacggtcggaatgttgctgtaatccagatgctcatccggcttgttattaaacaggcgttcagagagacggcgacccgctgcaactgccaccggtgtcagctccactgcacccgtgttatcgcccaccgcgtaaataccttcaatattggtgttttgatatttatcgacgacgatatagcctttttcgttagttttaacgccagcggcttccaggttgatgttgtcattggcaggctcgcgaccaatcgcccaaatcaggcaatccaccgtttcactgcgaccatcttccagctccagcgtcaggctaccatcggtatttttcactaccgctttcgggatggcgttggtgtgcagctgcgggccttcggcgttcatcacttcgaccagcgtttcggaaatcatcgggtcgaagctgcgcagcggcgcatgtttacgcacaaacagatgcgttttcgcgccgaggccgttaatcacgcccgccagctcaacggcgatgtaacccgcgccaacaaccgccacgcgctctggcaaagcaggaagggcgaagaagccatcagaatcaataccgtattccacgcccggaatatccgggtggctcggacgaccgcctgtggcgatcagaatatgatcggccgtgatggtttcgccgtttacctccagcgttttggcatcaacgaagcgggcaaagcctttgattacatcaacgttatttttaccgagcacgttttcataggaagtatgaatacggtcgatataggcggtacggctggcgatcaacgtttcccagttgaatttattgatagtggtatcaaaaccataatccgggccgtacatatggatcgcttcacggatttgcgccgcgtgccacatcacttttttcggcacacagccaacatttacgcaggtgccgcccagctctttggcttcaatcagcgcacatttctggccgtacatagccgcgcggttgatggaggcgataccgccgctgccgccgccgatggcgatgtaatcatagtgtttagtcatgacaaagtgtccttatcgttgattaccgcgattgtagcgcgagacgtaataggtgccagcaatggctgcaattactccggcacgatccagcttacggtggcgtgcccggtgcctgccggaaccagtttgctgtgcagccacggcagcacgttattcatctgttgttccagtttccacggcgggttaatcacaatcatgccggaagcggtcatgccacggcgatcgctgtctggcagtaccgccagttcaatttgcagaattttgcgaataccggtcgcttccagatcgtggatcatgcgcttaatttgctgacgcagcaccaccggataccacagtgcgtaaataccagtggcgaaacgtttgtaaccttctgctatcccgctgaccaccgcttgatagtcagttttcatttcatacggcgggtcgataaggattaaaccacggcgggaaaccggcggcagtttggccttaagctgctggaaaccgtcggctttttcgacacgcgcacggctatctttctgaaattcagaacgcaacaacgggtaatcgctcgggtgcagttcggtcagttgcaggctgtcctgttcacgcagtagcaggcgagcaatcaacggcgaaccggggtagtaacgcaactgaccgctacggttgaagtgttttaccacattgatgtacgcctccagttctgcgggcaaatcgtcctgctgccagatacgggcgatgccttcgagatattcgccggtacgctcggcatgttcgctgcctaactgataacgcccggcccctgcgtgggtgtcgagatagagaaacggtttatctttctctttcagcgactcgatgatcaggctctgaacggtatgtttaaggacgtcggcgtggttgccagcgtgaaagctgtggcgataactgagcatgggtaaaggtgttccggtaagtaaaaatcggcccgtattcggggcgcacaaaagcgtatcaggacagtataccgaaaagaggccgccgccgcgaaagcgtaacgtttctcattgaaattcactacacttaaccccatgctacacacattatgtaaagcgcctgttgagcgcttccttaacctctttaaccaggactgcgcgaatgacgaatccgttactgactccctttgaattgcctccgttttctaaaattctcccggaacatgtcgttccagccgtgactaaggcattgaacgactgccgcgaaaacgtggagcgcgtagtagcgcaaggggcaccgtacacctgggaaaatctctgccagccgctggcggaagtggacgatgtgttggggcgtatcttctccccggtcagccacctgaactcggtgaaaaatagcccggaactgcgtgaagcctacgaacaaaccctgccgctgctgtcggaatacagcacctgggtagggcaacatgaagggctgtataaagcgtatcgcgacctgcgcgatggcgatcattacgccacgctgaacacggcgcagaagaaagcggttgataacgcactgcgcgactttgaactctctggcataggtctgccgaaagagaaacagcagcgttacggcgaaattgcgacccgtctttctgaactgggcaaccagtacagcaacaacgtcctcgatgcgacaatgggctggaccaaactcgttaccgacgaagcggagctggcggggatgccagaaagcgcgctggctgcggcaaaagcccaggccgaagcgaaagagctggaaggttatttgctgacgctggatatcccaagctacttgccggtaatgacctactgcgacaaccaggctctgcgtgaagagatgtatcgcgcttacagcacccgcgcctccgatcaaggcccaaacgccggtaaatgggataacagcaaggtgatggaagagatcctcgcgctgcgtcacgaactggcgcaactgctgggctttgaaaactacgcctttaaatcccttgccactaaaatggcagaaaacccgcagcaggtgctggatttcttaaccgatctggcaaaacgcgcgcgtccacaaggcgaaaaagagctggcgcaattgcgtgcctttgccaaagccgaatttggcgtcgatgagttgcagccgtgggatatcgcttactacagcgaaaaacaaaaacagcacctctacagcatcagtgacgaacagctgcgtccgtacttcccggaaaacaaagcggttaacggcctgtttgaagtggttaagcgtatttacggcatcaccgctaaagagcgtaaagatgttgatgtctggcatccggatgtacgtttcttcgaactgtatgacgaaaataacgaactgcgcggtagcttctacctcgatctgtatgcccgtgaaaacaagcgcggcggggcgtggatggatgactgcgtaggccagatgcgtaaagctgatggttctttgcaaaaaccggtcgcgtatttgacttgtaacttcaaccgcccggtaaatggtaaaccggcgctgttcactcacgacgaagtgatcaccctcttccacgagttcggtcacggcctgcaccatatgctgacccgcatcgaaaccgctggtgtttccggtatcagcggtgtgccgtgggatgcggtcgaactgccgagtcagtttatggaaaactggtgctgggagccggaggcgctggcgtttatctctggtcactatgaaaccggcgaaccgctgccgaaagagttgctggataaaatgctggcggcgaagaactaccaggcggcgctgtttattctgcgtcagctggagttcggcctgtttgatttccgccttcatgccgagttccgcccggatcagggggcaaaaatcctcgaaactctggcagaaatcaagaaactggttgccgtggtgccatctccgtcctggggccgtttcccgcacgctttcagccatattttcgccggtggttatgccgcaggttactacagctacctgtgggctgacgtactggcggcagatgctttctcgcgctttgaggaagagggcattttcaaccgtgaaaccgggcagtcgttcctcgacaacattctgagccgtggcggttcagaagagccgatggatctgttcaaacgcttccgtggtcgtgaaccgcagctggatgcgatgctggagcattacggcattaagggctgatcattcagtgaaaatctgcttaattgatgaaacaggcaccggagacggtgccttatctgttctggcggcccgctgggggctggagcacgatgaagacaacctgatggcgctggtgttaacgccggaacatctggaattgcgcaagcgtgatgagccaaaacttggcggcatctttgttgattttgttggcggagcgatggcgcaccgacgcaaattcggcggtggtcgcggtgaggcggtggcgaaagcggtgggcattaaaggcgattatttgccggatgtggtggatgccactgcaggacttgggcgcgatgcctttgtactggcttcagtcggctgccgcgtgcggatgctggagcgtaatccagtggttgccgcgctactcgacgacggcctggcgcgtggttatgcggatgcggaaatcggcggctggttgcaggagcggttgcagttaattcacgcctccagcctgacggcgctgactgatattaccccgcgcccgcaggtggtttatctcgacccgatgttcccgcataagcagaaaagcgcgctagtgaaaaaagagatgcgtgtctttcagtcgctggtgggaccggatcttgatgccgatggattactggagcctgcacgcttgctggcgaccaaacgcgtggtggtaaagcgcccggactacgcgccaccgctggcgaatgtcgccacgccaaacgcggtagtcactaaagggcatcgctttgatatctatgcaggtacgccagtgtaaaactaaaacagggtagcgataacgctaccctgctttctgcaagaataattaatggctttccggcgtcgcaatcatgcgtttcagccacggcaccatcaacagcatcactactgcaacgcccagcgtgaccagaccaatcttaccaaacacgttggtatagacgggcaacgtctcaagcggatcggtaatgttgtccggcaccgcggtaaatgttgccacatagccgcccagcaagaacgcggcagcctgcgtcaggaaccacatcccgagaataaagcccatcaaatgctgcggcaccagggcagcaatcatcgccaggccaagggcgctaataaacagttcacctaagctctggaataagtacaccagcacgataaaccatggcgatgtcagcccttgtgcatccgcaaaccacattcccgcagctgccgccgtcaaaaagcccagtgagcacataaacatgccgagagtaaatttcatcggcatcgagaggtctttgcctttgttacccagatgcgtgtaaatgcctgccagtattgggctggcgagtaccacccagaacgggttaagcgcctggaagctgaccgggttgatggaaaaaccgagaatttcatgatgcacgttgttgatggcaaagaagttcagcgatgttggcatctgggcgtagagaatgtaaaacaccaccgcttcgagcatcaggacaaaggcgacaaacattttattgcgcccggttttatccagcttgaatgcctgacgaaagaagatgatggtgacgacgatggagagaacaatcagcaccagattggcgacttctacgttgtgcatcagccatgcgcatacgaagatcatcaccacgctgccaagtaacacgtacaacagtttgctgaagctcattggccggaagtcgggttcagaaccaatgtctttcaccattccacgacaggcgatgtaaaccagtaatgcgataattaaccccgccccgcacaggttgtaggtgactgaataaccgaatctatcagcgatcacaggggccagcgataacgctatcaacgagccgatgttgatcgacatatagaacagggtgaatgcgccatcaagccgcggatctttcggcggatagcacttcgaaagcaagctggctgggttagctttaaacaggccgttaccgacagcgatagtccccagggcgatgaaaatcaggtcaggcttaagtagcgacatgccggtcatgaagtagccaatcgccagcacaagtgctccaagaacaatggtgcgtttggtccccagcaggtggtcgccgacatagccgccaatggaaatgaggccatagaccagcgcagcaaaagcaccaaaagtgacaaaagcctgctcttgcgagaatccaagctgtttaacgaagaaaaccgccagtacgccctgcacgccgtagtagccgaatcgctcccataactcgacaaaaaagatcatgaaaaatgggcgaggttgctgcagcatccccatgggtgttgttgtattcatatttattaaccttccaataccatcctgaaaagtatgaacgcgtaagggataacgcgcgaaaaagtttacatctgtcagagattcttaatattgatgcggtgaatagattaatacactattacaacagaaaataaccagatgatcacactaatgatggaaaatatgatggtgttaaatgttgtattggctggggattttgattgcgtacgcagaccgtaggccagataaggtgtttacgctgatcaggtaacaaggcgcgccaaaaagcaaaacgcccgcatatgcgggcgttcaggaacacgtcgtagagggaagattattcttcttcgtcgcgcagcggaacaatcagcatatcaacgtgaacggtgttgatcagctgacgtgcggaagacatcagtttgctccagaagtcctggtggtgaccacaaaccaccaaatccatatcgtatttcttgattgcatcgaccagaacctggcccaggtcgccgctgccgctcagggtttcagtgattgggtagcctgcattagtggaaagctcggtcagtgcatgatgtgtctcttcagagatgcgtttctgcatatcacccagattcacatcaataagcccggtgtataggtcagagtagtttacatctacgtggatcagagaaactttcgcattgtaggggcgagccatagagactgctttctctaccagaactttgctttccggggagaggtcgaccgcgatgagaatgtgtttataagccatagtgttactccttccataaagttgtcgatgactggccagctagcgtttcttgtgccgttacgtcacccgcgtcctgcgaactacgtgcgcggggctaacccagccgtaaagattcagtgttaagaccatccttaccttatagcgacccggatgatccgtcaatccgccttgcttactcgttagataaacaaattttcgacatgaatatattgatagtggttaaccttctggaaaaaaaacaacctgatctcctacactatctatagagccgctcgtatgttggtcaccacaaaagcggtttctccaggacctggtgttaactgattggcagcgtatcgggagcggtagccccggggtggaactccgcgggcaggtcgccggggaggaggtatgataagcaccgtcgcattattttgggctttatgtgtcgtttgcattgttaacatggcgcgctatttctcatcactacgcgcgttgttagtggtactgcgtaactgcgatccattgctctatcaatatgttgatggagggggcttttttacctcacatggccaacccaacaaacaggtgcgtctcgtttggtatatctatgcccaacgttatcgcgatcatcacgatgatgaatttattcgccgctgtgagcgggtgcgtcggcagtttattctgaccagcgcattgtgtggtctggtggtggtcagcctgattgcattgatgatttggcattaagcacttcagcaataataacgcataaaaaaagcgggccagtaaactgacccgctcgagactgattacaaacgcaaaattgcctgatgcgctacgcttatcaggcctacataatctctgcaatctattgaatttgcatgtttttgtaggccggataaggcgttcacgccgcatccggcatgaacaaagcgcactatgtcacaatctgaagcgggccagctgacccgctcgttttggtgcgtacgattacaggaactgcaaggagagccagtacagcccgccggaaagcagtaccgcagccggaagggtaaacacccaggccatcagaatgctggtcacggttttacgctgtaagccgccaccatctaccaccatcgtccccgcgacagaagaggagagtacgtgagtagtggaaaccggcatcccggtataactcgccaggccgatagacactgccgccgtcatctgggcagacatcccctgagcgtaggtcatgcctttcttaccgattttctcaccgatagtcgttgccacacggcgccagccaatcatcgtaccgatacctaacgccagcgcgaccgccatgatgatccacaccggtgcatactcgatggtgctaagcatgtcggacttcagtttcttcaacaggcgctgatcgtcagcactcacgccaggcatcttcaccactttgtcgatagtgtcagaaacgcacagcataatgcggcgcatctggctacgttgatcaagcgacagcttgtcgtagctttccacatcggtggtcaacatacctttcaggcggttgagcgcgttaatggtattcgacggatggcagtggaactccgcaggttgcgttgcgccagcttccggagccggtactaactgatcagcaccggtagcctgtttgagcagcgcaggatgctgctcaaagtaagcttcgacgttgttgatggcatcacgggtacgggtgatttcgtagccagtggcattcatgttcaccacgaagcctgctggcgcgacgccaatcaataccaacataaccagaccaatgcctttctgaccatcgttcgcgccgtgcgaaaacgccacgccgatagcggaaaggatcagcgcaatacgcgtccagaacggcggctttttcttgccgtctttcttttcacgctccgctggggtcaggtggatacgggcgcgtttcttggtgccgctccagtagcgacgcagcaagaaaatcagaccgccagcaaacaccaggccgacaataggggaaacgatcagagaaccgaaaatacttaatactttcgggatattgagtgcatccaccactgacgtcccggtcatcaacgcattggttaaaccaatcccgatgatcgcgccaatcagcgtatgagagctggatgcaggtaaaccaaagtaccaggtacccaggttccagataatcgccgccagcaacatagagaacaccatggcaaggccatgagacgatcccatattaagcagcagatccgtcggcagcatatgcacaatggcataggcaacactcagaccacccagcaaaacacccaaaaagttgaataccgccgccataaccacggcgagctgagaacgcatcgcgcgggtatagataacggttgccacggcgttggctgtgtcatggaaaccattgatggcttcgtagaacagcacaaaagccagtgcaagcaataataacagcccggtatgcaaatccaggccagcaaacaaatgtagcataggacgttacgccattttgaggacatgaacgcggcgcattatcagtgactttcgcggcgcgggcaaagtgaaatatagactttttttgatttgccccctgtatggatttcactcaaaaaataattatcttatataattcaggcaaatacttccttttagtaatattgatgctggtgcgaccactgaggaatctttacaattcacgcccgttttttctaagaggagcgcaacgtggaaaggtttgatgccattattataggcgctggtgcggcgggtatgttctgttctgcgctggcaggtcaggcaggacgccgggttctgctgatcgataatggtaaaaaaccagggcgcaaaatccttatgtctggcggtgggcgctgcaactttaccaacctttatgtcgaaccaggcgcttatctgagccagaatccgcatttttgtaagtctgcactcgcacgttttacccagtgggatttcattgatctggtcaataaacacggcatcgcctggcacgagaaaacgttagggcaactcttctgcgatgactccgcgcagcagattgtcgacatgctggtggatgagtgcgagaagggcaatgtgaccttcagattgcgtagcgaagtgctgagtgtggcgaaggatgaaacaggcttcacgcttgatctgaacggcatgactgtcggttgcgaaaagctggtcatcgcgactggtgggctgtcaatgccggggctgggcgcgtcgccgtttggttataagattgccgaacaatttggcctcaacgtgctgccgacccgcgcgggtctggtgccattcactctgcataaaccgttgctcgaagagttacaggtgctggcgggcgtggcggtgccttccgtgattaccgctgaaaacggcaccgttttccgtgagaacttactcttcacccaccgcggcttgtctggaccggcggtgttgcagatttcaagctactggcaaccgggggaatttgtcagcatcaatctgctaccggatgtggacctcgaaaccttcctgaatgagcagcgtaacgcacatccgaatcaaagcctgaaaaacacactggcggttcatctaccgaagcggttggttgaacgcttacagcaactcgggcaaatcccggatgtttcgctaaaacagctcaacgtgcgtgaccaacaggcactgattagcacattgaccgactggcgcgtacaacccaacggcactgaaggctatcgcactgccgaagtgacgctcggcggcgtggacaccaacgaactctcttcacggacgatggaagcgcgcaaagtgcctgggctgtacttcatcggcgaagtgatggacgtcaccggctggctggggggctataacttccagtgggcgtggtcgagtgcgtgggcttgtgcgcaggatttgattgcagcaaagtcgtcctgacctatttcctaaagatgaaaattattagagtcgcattaaaaatgagctaattttgatagtggttatcttgtgattattttctaatgagcccgtgaactgaaaccctccatgcttaatataaggtggatggaaaggtgattgaaaactcactcagtggccagatctttatgaaatatgaacaggttgaaaaaaacagtaactttgctgttttttatacttaaccactatgcattaatgctgcgttatttcatgatgcctaagaaaaaccagcgttacgcaaatggtcaacgctggttttatccggtacgttgcaattattttttagcagaacccgcttctaatattgaaacgattgagaacaacgtaaagcataccgctcccaaaccgaccagaactcgcgaaggaataaaatatcccatgtcggtctgcgccatttccgcaagaaacgatgccaggaaaaggcaaaacaggcaggtgaagacgggaatcatcggtattctgttggctaacgaacaggtacgtctccataccagtgccagtagccagacttttgagaatatgctgtaacagatcattccgaggcaaataagaataatgccgggagccagtcgggcgcttgcatcggaactgactaagacgtatatcccctgcagtaccgtgattgagccgagaaaaataacccaataacaccacagccagtgttctttagttgaaaacgtattacgtgtttgatggacaattgtggcaacaaggccaattagacaggcacagattgcggttaacccaagcaatacgtgacccgcgacataatgcggagttatgtcagcactacgtaacagcgtaatagaccaaatgaaaccgagcagggtgagtaaaacgggaacggcaatgaggcagttaccgattaatgaagaataagcctgtaccggtgttccgtcgctcttgctccccgctgcatttttgggaatgagcagaaagtgaccggatgacgctgccaccgtcgatacacaggcggcaatcataccaacgccgaaaataacatggccggcgacaaactcgtctgccatcacatcattgcctgctaacagtgcccaaccccatatcatggtgataattgaccccgcatagccaataatggggaacaatgtattgtaaaacgtattaacgccgcgcgtgagctgcgaaatgataataaatgcggtagtgaataatgccaggcatatggccgccagagaaatcagcacatgacccgcgacgaaatactcgctttgccctgaactttccagcacaaagccacctaacgcgatacaaattaagcccataatcaaagggattaatttgaaaagccacccgatatatatgttcactttaaactcctcaggtatccctgctaatattgaaatatgcattaatgataatttcatcctgttaatataatgacgagatatcattaaagacaaatgcatagcataactatagcggggtttactttgcagagcgctacttttcagcgttcaaaaggccatgataaataaaaatttatcctaagattaattcttatgctgttgttttttacaattatcttccagggagggattattcttcattatttggtaaaagaccggatagtctcggtgcttaaaatcagcgaacatataagtattattattttatatcgtcgtaaatctgtttttcagacaagtatcatttattttgttacaaacaattcaaaaatatcacaggttatttatgaaagcaattgacaatcagattagaaacatctcttcaagccatcaagataagcattcagataaagttaacagtcatcaacaccatggcaaggttgataaaacacatcgtgcaaagatagttgaatttgataaactggataatgattcgcaaatagataacgattttggcctgcatatcatctatttcctgcaacatggtcactggaaggtaaatgatcgtagtcaccagatggagaaagtatggttttataatagtgaaccttctatagatattcaagaatataatagattcgccgacaatactactgatacgtttatctttacaattataccagacaataaccatgtgttaaaattatcgtctcccattaccgttactgttgagtgtaagggcggttattattttattaattcctctggagataaatcagatataatttataaagttgatgggctttctatcatagcgagaaatttctttactcttcttagtggtaatttcaaacctgactggcgttgggatgtctctaaagagacgtttactaaggaaaagtttgatagctatgttaaatctgtgttttcaaaaatagacttctataaacagtgtggtgtgattaacccacaaaatgccaacacggcttattttggcgatacagatggaagagtaggcgctgtactttatgcattgctcgtttcagggcatataggcatcagggaaaagggttggagtttattatgtgaattattaaaacacgaagagatggcttcatctgcatacaaacataaaaataataaagtgctctacgatttattaaatacgagagacatgatcttgaatgagttgcatcaacatgtttttttaaaggacgatgcgataaccccttgtatcttccttggggatcatacaggcgatagatttagtactatttttggtgataaatatatccttactttgctaaattctatgcgaaatatggagggtaataaagatagccgtattaataaaaatgtcgtcgttctggctggaaatcatgaaatcaattttaatggtaactatactgcacgactagcaaatcataaactctctgccggtgatacgtataacttaattaaaacgctcgatgtttgtaattatgactcagaaaggcaagttttaaccagtcatcacggaataataagagatgaagaaaaaaatgttattgtctcggtgctttgcaggttccatttaatcagatgaaaaatcctactgatcctgaggaattagccaatatttttaataaaaaacataaagaacacatggatgatcctctattccatctaatccgaagcaatactttgaaacccacacctgtatatgctaattattttgataacactactgatttcagaccagcacgtgaacgtatcttcatatgtggggagacactcaaaggtgaagaccccagcaaatacattagacaaaaatatgggcatcatgggcccggggtagatcataatcaacaatttgataatggtattatggggctaaattccctgaaggaagcacgtgataaaaataataaaataatttattcctcagggcttagttgttttcaactacattaaaactccatgaatacggtggtatgtctttttaatcctgccagtatttcataggttttcttaatcgattgtagaggcatgttctgatgacgcctctacaatctttagggactttctctgctatgagataagaaatttcatattatgctttgaggctgaatgatttgtgcaaaatataattattttcccatcgaacatgaggtgtatgtcataagataaaatgttaactatgtattcctcgcggtaaataatatgaggtaaaatatgaaaattggaactgtggcaggcactaacgacagtacaacgacaatcgcaacaaatgatatggtgcaagagcatgttaccaacttcactaaagaactgtttgggtatattgcaaatggtataggtgatgatatatcaagtattgccaggacaatgctcggtgaggttgtggaaaaaatagatgattggcaaatagaacggttccaacaatctattcaagatgacaaaatttcatttaccatacaaacggatcattcagaaaaatatagtatgctatcgggcatgcgtgctcatattctacgtaggaataataattatcagtttattgtgacaattaatagcaaaaattacggttgctctcttgataataccgatattaattggtgcagtattgtttatttacttaataatatgacagtaaatgataatgctaatgatgttgcagttactgagtcgtacaaacccatctggaactggaaaatatcgcaatataatgtatctgatattaaattcgaaacaatgataaaaccccagttcgctgacagaatctatttctccaattgtttacccgttgatcccacaagtaccagaccaacctattttggtgataccgatggctcagtcggtgcagttttgttcgcgcttttcgcaacgggacatttgggaatcatggctgaaggagaaaatttccttagccagttgcttaatatagaagatgaagttctcaacgtattgctaagggagaactttaatgagcaacttaacactaatgttaatacaataatcagtatcctgaacagaagagacattattttagaaagtcttcagccttatttagttattaataaagacgctgtgacgccatgtacgtttctgggcgaccaaaccggcgatcgatttagcaatatctgtggtgatcaatttatcatcgatttgttaaaacgcataatgagtatcaatgaaaatgttcatgtattagctggaaatcatgaaacgaattgcaatggtaactatatgcagaacttcacgcgtatgaaaccactcgatgaggatacctactctgggataaaagattatcctgtatgtttctatgaccccaaatacaaaataatggcaaatcatcatgggataacttttgatgatcagcgaaaacgttacattataggaccgataacagtctctattgatgaaatgaccaatgctctcgatccggtcgaattagcggcaattatcaataaaaagcatcatgctataattaatggcaaaaagtttaaaactagccgggctatctcttgtcgatcctttaatcgttatttttctgtttcgacagattacagacctaaacttgaagcactattagcatgttcacaaatgttaggtataaatcaagttgttgcacataacggaaatggtggaagagaacgcataggcgaaacggggacagttttaggtcttaacgcccgtgacagtaaacatgctggaagaatgttcagcatgcataattgccaaattaaccctggtgcagggcctgagataaccactccctggaagtcttaccagcatgaaaaaaacagaaatggacttatgcctttgattagaaggcgcacaatgttacagctctgaaccatagacaacatgaatattaatgttactatctggttgagactgttgataaaacgtaaaaaggaatgctctgttcctgcaactgaacaggcgtgaaacgctatccaacaggatggataccgttttgtcagccagttttatagatcacacttatgagtatgcgtgtttcatttacggccaggaatgctgatgatgacaacattactacccgttttcactaagccttccccgttggcgctcaatgctctgcgcgctggtcgtatttgccgtttccttcttatcccggatggaagaatccgctgaacgtcgttcggcggcagttgtaacacgcgtcgtttgcttacagggattatggcgggtcgattatggataagagtaagcgccatctggcgtggtgggttgtcgggttactggcggtggcggctatcgtggcgtggtggctgttgcgcccggcaggtgtgccggaaggctttgctgtcagtaatgggcgcattgaagcgacggaagtggatattgccagcaaaattgccgggcgtatcgacaccattctggtgaaagaaggcaagtttgttcgcgaaggtgaagtgctggcgaagatggatactcgcgtgttgcaggaacagcgactggaagccatcgcgcaaatcaaagaggcacaaagcgccgttgctgccgcgcaggctttgctggagcaacgacaaagcgaaactcgtgccgcacagtcgctggttaatcaacgccaggcagaactggactccgtagcaaaacgtcatacgcgttcccgttcactggcccaacgaggggctatttctgcgcaacagctggatgacgatcgcgccgccgctgagagcgcccgagctgcgctggaatcggcgaaagctcaggtatcggcttctaaagcggctatagaagcggcacgcaccaatatcattcaggcgcaaacccgcgtcgaagcggcacaagccactgaacggcgcattgccgcagatatcgatgacagcgaactgaaagccccgcgtgacggacgcgtgcagtatcgggttgccgagccaggcgaagtgctggcggcaggcggtcgggtgctgaatatggtcgatctcagcgacgtctatatgactttcttcctgccaaccgaacaggcgggcacgctgaaactgggcggtgaagcccggctgatcctcgatgccgcgccagatctgcgtattcctgcaaccatcagttttgtcgccagtgtcgcccagttcacgccaaaaaccgtcgaaaccagcgatgaacggctgaaactgatgttccgcgtcaaagcgcgtatcccaccggaattactccagcagcatctggaatatgtcaaaaccggtttgccgggcgtagcgtgggtgcgggtgaatgaagaacttccgtggcctgacgacctcgtggtgaggttgccgcaatgacgcatctggaactggttcccgtcccgcctgtcgcgcaactggcgggcgtgagccagcattatggaaaaaccgttgcgctgaacaatatcactctcgatattccggcccgctgtatggtcgggctgattggcccggacggcgtcgggaagtcgagcttgttgtcgttgatttccggtgcccgcgtcattgaacagggcaatgtgatggtgctgggcggcgatatgcgcgacccgaagcatcgccgcgacgtctgcccgcgcatcgcctggatgccgcaggggctgggcaaaaacctctaccacaccttgtcggtgtatgaaaacgtcgattttttcgctcgcctgttcggtcacgacaaagcggagcgggaagtgcgaatcaatgagctgctgaccagcaccgggttagcaccgtttcgcgatcgtccggcagggaaactctccggcgggatgaagcaaaaacttgggctgtgctgcgcgttaatccacgacccggaactgttgatccttgatgagccaacaacgggggttgacccgctctcccgctcccagttctgggatctgatcgacagtattcgccagcggcagagcaatatgagcgtgctggtcgccaccgcctatatggaagaggccgaacgcttcgactggctggtagcgatgaatgccggagaagtgctggcaactggcagcgccgaagagctacggcagcaaacgcaaagcgctacgctggaagaagcatttataaatctgttaccgcaagcgcaacgccaggcgcatcaggcggtagtgatcccaccgtatcaacctgaaaacgcagagattgccatcgaagcgcgcgatctgaccatgcgttttggttccttcgttgccgttgatcacgttaatttccgcattccacgcggggagatttttggttttcttggttcgaacggctgcggtaaatccaccaccatgaaaatgctcaccggactgctgcccgccagcgaaggtgaggcgtggctgttcgggcaaccggttgatccaaaagatatcgatacccgccgtcgggtgggctatatgtcgcaggcgttttcgctctataacgaactcaccgtgcggcaaaaccttgagttacatgcccgtttgtttcacatcccggaagcggaaattcccgcaagagtggctgaaatgagcgagcgttttaagctcaacgacgttgaagatattctgccggagtcattgccgctcggcattcgccagcggctttcgctggcggtggcggtgattcatcgcccggagatgttaatcctcgatgagcctacttctggtgtcgatccggtggcgagggatatgttctggcagttgatggtcgatctctcgcgccaggacaaagtgactatcttcatctccacccactttatgaacgaagcggaacgttgcgaccgcatctcactgatgcacgccggaaaagtgcttgccagcggtacaccgcaggaactggttgagaaacgcggagccgccagtctggaagaggcatttatcgcctatttgcaggaagcggcagggcagagcaacgaagccgaagcgccgcccgtggtacacgacaccacccacgcgccgcgtcagggatttagcctgcgccgtctgtttagctacagccgccgcgaagcgctggaactgcgacgcgatccagtacgttcgacgctggcgctgatgggaacggtgatcctgatgctgataatgggttacggcatcagtatggatgtggaaaacctgcgctttgcggtgctcgaccgcgaccagaccgtcagtagccaggcgtggacactcaacctctccggttcccgttactttatcgaacagccgccgctcaccagttatgacgagcttgatcgtcggatgcgtgcgggcgatatcacggtggcgattgagatcccgcccaatttcgggcgcgatatcgcgcgtggtacgcctgtggaactcggcgtctggatcgacggagcgatgccgagccgtgctgaaacggtaaaaggttacgtgcaggccatgcaccagagctggttacaggatgtggcgagccgacaatcgacacccgccagccaaagcgggctgatgaatattgagacgcgctatcgctataacccggacgtaaaaagcctgccagcgattgttccggcggtgatcccgcttctgctgatgatgatcccgtcaatgctaagcgcccttagcgtggtgcgggaaaaagagcttgggtcgattatcaacctttacgtgacccccaccacgcgtagtgaatttttgcttggtaaacagttgccatacatcgcgctggggatgctgaactttttcctgctctgcggcctgtcggtgtttgtgtttggcgtaccgcataaaggcagtttcctgacgctcaccctggcggcgctgctgtatatcatcattgccaccggaatggggctgctgatctccacctttatgaaaagccagattgccgccattttcggaacggcgattatcacgttgatcccggcgacacagttttccgggatgatcgatccggtagcttcgctggaagggcctggacgttggatcggcgaggtttacccgaccagtcattttctgactatcgcccgcgggacgttctcgaaagcgctggatctgactgatttgtggcaactttttatcccgttactgatagccatcccgctggtgatgggcttaagtatcctgctgctgaaaaaacaggagggatgatgcgccatttacgcaatatttttaatctgggtatcaaagagttgcgcagtctgctcggtgataaagcgatgctgacgctgattgtcttctcgtttacggtgtcggtgtattcgtcagcgaccgttacgccaggatcgttgaacctcgcgccgatcgccattgccgatatggatcaatcgcagttatcgaaccggatcgttaacagcttctatcgtccgtggtttttgccaccggagatgatcaccgccgatgagatggatgccggactggacgccggacgctataccttcgcgataaatattccgcctaattttcagcgtgatgtcctcgccggacgccagccggatattcaggtgaacgtcgatgccacgcgcatgagccaggcatttaccggcaatgggtatatccagaatattatcaacggtgaagtgaacagctttgtcgcgcgctaccgtgataacagcgaaccgttggtatcgctggaaacccggatgcgctttaacccgaacctcgatcccgcgtggtttggcggggtgatggcgatcatcaacaacattaccatgctggcgattgtattgaccggatcggcgctgatccgcgagcgtgaacacggcacggtggaacacttactggtgatgccgataacgccgtttgagatcatgatggcgaagatctggtcgatggggctggtggtgctggtggtatcgggattatcgctggtgctgatggtgaaaggtgtactgggcgtaccgattgaaggctcgatcccgctgtttatgctgggcgtggcgctcagtctgtttgccaccacgtcaatcggcatttttatggggacgatagcgcgttcaatgccgcaactggggctgctggtgattctggtgctgctgccgctgcaaatgctttccggtggttccacgccgcgcgaaagtatgccgcagatggtgcaggacattatgctgaccatgccgacgacacactttgttagcctcgcgcaggccatcctctaccggggtgccggattcgaaatcgtctggccgcagtttctgacgctgatggcaattggcggcgcatttttcaccattgcgctgctgcgattcaggaagacgattgggacaatggcgtaaatacaattgcccgatgcgtaagcttatagggactacgcatcggtgcaatttattgaattttagttgtttttaggccggataaggcgtttatgaactgacccccaaaacctggacagtttcagttaaccggctttttgatactcagtcctgtattcagggcaagattacgaaagcccgctccccgcaaggactgacgccagatagtttctgtccatggctgcttttcgcatcttacgtcttaaccctgccttgaataccttatcattcgtcaaaatattaatagcaatgtgccgtatccctgaaaataattctgctgcatttcctcttcttattttgcagtcgtcttcattcattaccacgtccagacgccagtgcagcttattctccacgtgccagtgatttcggatcgctgtggcgaatttctcagcggttaaatcagcagaactgatataatatctgaccgtcatttctggctctttcttttgttctgctattatggaccgaaaggagactgccacgcataatttcttcagccctttccattcaaacgtgaaatcaataagttcatcagggacatcgcaaacaatatgaagacggatttcttctctgccgtgactcttttcactgattgcgtaactgtcatgctctggattatttaattctttcagcggaaatttttcctcaaaggctttatttagccgcccctgggttccttttaccgcgaataaataatcacctccctgtttttgtatcttctctgcaatatctttctggcaacccatcgcatcagttgtgatgatttttcctttaatatccagcatgttaagaagttctgggatagctgtaatctcattagatttctcatccgtcttgatctgtccgatgaccagactgtgcattgttgagaacgcactaatgacatgaatcgctcccctgcggcgactcttgtcataagagtgccggagcgtttttccatcaattgcaatgacgtctttatcatctgaagaatggcagtcacgcatccagttaataaagcactcgtgaaattttgcaggactgatacaggatacaactctggcaatggtatcgtgaacaggaataccattttcaaaatcaccatattgcttcaaaaaatcgagatgtgtttccccaaaatcctctatatcttcccaaccttctgcaccagaaataacggcacaaatagtcaacagtagaatatccgataatttatgttccactttccaggtttgtctgtaatcggggataatagaaatatgttccatcaattttttaagttccattttgttctccttaattaggtaaggagtatttgatcatgtataagcaataaaaaacagcttcaggtaataaggaatatctcaatttttaaacataaaatgcgaattatttagtgcaaaaagtgaacttttgatgatctttccctggccgttgactcgattgccgtagctcgaacgcaagcactcttatcattcaatgccatattgttcaaaatattaaaaacattatcttcgcattttttgcaaatttatatttgcccgagtataaatgctccgatatctctacggatataatttttgtcagtgcagaattcaattgccaatctaacagcgtcttgcccccctcttaactgtaatactctggcagatgaaatccttttcaaggaattgcgatcatcaagtaagcgaaataattcatcatcatttagtttcttacatttattatataaaccatactctttacttgcctttcttttctggtatgtatttgacattgcaggaacctccataaaggctatctttttctatcgtttgactgtctggagtcctccacctactctgccatcagcgcacacgatgtttgattatccttacatacttattttccgtggccaaaattcagaattctcccatcatttttgcctatttctataataaaaaccccaccagcaatttggtctgagtgaatggtaccttcaacaacccaacttgttgttaactcagtgatttcgtatggtttttcttcttctgcggcatcctgtccataacgattcttaacatatatctcagctaattccaatgctatagctttatttttaaccaaatttctaacggtatatttaccttcactttcatacttgcgcattattttaatattattattacactgcgcccatgtgttgtatgtaaaaacaaacaaagatacaatgacacagttcctaaacaatatttttttacatattaccatgaactctgcagacattaggtaatccttttctgtttgttatttccttcccgtggttatctattgctttaaaattaccactgggcgtacctaaataaaatgacttgatattgttatctttacttttaactattttctcatctttacctgaaaatatttcgtcccaatattctccatgactatctgcaccatgagtatgataagctgatactttctcagtaccattagggcaagggctattgaatggatatgatccttttctttctcctcggttaggtgctgttgagaaatatctgccactattatccttacatattaaaccagcgaactctttatcttcgcaaatagattggctatttattttatttaaggcgtcatatgcggtgctatctatagaatcaaatttatctggacctatcatagcggatagtgtgccgcaaagaccattagtacatgcccccgattttgcatcctcccacatagataaacccagggggtcgatgtctgatatcggattcaattgatatccatacaggttccatccccccttcagtccaatcggatcctgagtgatatatcgcccctgcagcgggtcataatagcggtggcggttgtaatacaggccggactcctcatcatactgctgccccggcagccggataagctgctgcagctgatgcgggttctcttcattcagcaggttgccccattcatcatattctgcgcaccacgctgttgccccttccgtgctgatgagcgccagcggcaggccgcgatggtcgcagtggtacaggtggatttttcgcgccggcgtgtacaccgggtccatctggttttgcatctgctccacggtcaggccgcacgatgccagccagcggcggctttcctcactcacccggtcagccaggatttcactttccagccggtcgagcatctgcaccagcaccggcgggaacaccacactgccaccgtcttcgccgccggactgctgaagggcatccgccaggctgcggcgctgcgttttcgccagctcaccggtggcagtttcgaccctgatgagtggcgtgaagctccccggctgataaatcgtctggatgcggctcctgtcgttctgtatcgtggtcagccggtcgccgtcccagccgtaccaggtcacttgcggtttccgtgacagcgacatccagcccgtcaggtcccgttcacgccgccacacccgttttgccaccctgcggcccagcgggtcgtaaagatagcgactttcgaccagcggctcttcatattgtgtccgcgtgtagtgcaccagccggtgctgactgtcgtaatggtaccggtgagtccgctcatcatccgtgcggataaccccttccgggatgaggtcggttttctctgtcagcctgccgtgacggtcataccggtaaagatagtgcgcgtcacgggcgatacggttatccggccacatgctgagggtgctgtccgggtgcagctccgggtcgggcaggcggttacctgccgggtctgtggcatacgggatgcggatatccagattcgctgcggtggtgtgaacgccggtcagcctgccggtggtgctgtagctgtaactccgggtctggcgcgggctgctgatgcggatgagttcgccgttgtcgttccaggtgtaatcgcggtcagacagcaggctgttcaggtgctggctctgtaactgcccggcaggggtataagcggtggtgagttcataacggccgaagctgcgcagcgtttcccggtgcaggcggtcgcgggtgtactccaccagcggtgtgtcgccgagtttcatgcctgccaggtaaccgctgccgtaggtcagccattccacggcgggcaggctgtccggtatacagcggttcgccagcccctgcgcgttgtacgcatgtctggtctcatgctgccagagcagtgcttccgtctgcgggtgatgcaccgtctgacgctcaccggtcagccggcctttctcatcatacctgtaatgcaccgccacccggtgcccttcgctgatatggctgatgtctgtcagccagccacgttcgtcatactgccaccgctctgcggtttcacccttcacggtgcggtgcgtgaggcggtctgcttcgtcatagtgccagtgggtgaccagaccctcatcctcgctgcggataagtttgccggtcaggtcgtggtgataacgctgtgtgcggccgtcaaagccggtttcctgtatcagccggtcaagtacatcgtaacggaaggtggtgtggctgccgttttcactggtcaggcggatgacccgtccggcagcatcgtattccatactgcgcgtcagcccgccctgcgtggtacggacggcctttccccacgcatcgtactgtgtcccgtttctgctgccgtccggggcaatgacggcggtcaggtcaccggcgatgttgtattcataccgcgtttcatggccctgcgtgtctttcacggcaattaactgtccacggctgtcgtatgcgcggtactgactcagcccttcctcgcggtgcaccgccgtcatctgcccgaagcggtcatggtcataacgggttacataaccggaacagtcggtgaagctcagcaactgaccgtaacggctccacgtcatggttttccggctgccggtggcatcttccgttgcgcagggtaagtcactgtgtggattatcataacggtagcgggtgatatcgccgtcaggggcagtttcctgaatcagacggcccaattcatcatattcccggcgcaattccagcccgtcaggcccggtggctgacgttaactggttgtggtggttatagtaaaacgccgatgccctgccatccggcgtggttatgcgcgtgatgaggcccgtcaccacatccgggctgtactctgttgtcctgcctgcggcatccgtctgtgccctgagcctgcccacggcgtcaaactgactctgcgtgacgctgccgtccgcgtgttcctttttcaccacccgcttcagcccggcttcgccctgcgtgtgcagcacttcacggcggtccaggctgtcggtgatggtgatgcggtctttctcatactgatacgtgtagcttaagcctgccgggtttagctgttctgtcacccgcccgtcgctgtcgtaacggtaacggatttccggccggcccgtgtgacggtgcgccaccatccggccccggtatttatcatcgtaagtaaagctgcgcacctgtttgccactacggtcatacaccaccgccagttcgccgcgtggcgtccagccatagcgcaccagcggcgcggcaggtaaattctccgggtattccgggtcgtgcgtcagccacacggcagacagacggatgccgttgtcccggccatattcggtgtaacccggcagggtatcaggaaaagcggacggttccgtcccgccggaaatggcctgctgccgggcttcttctgcccgctgcgcctgcgtggtcagtaccagccggaagtgacgccaggcaccatccgtcacgccggtgatttcgccgctgaattcaccggcggcttcgcggtggaacgtctgtgtgcgcccgaagcggtccaccagcccggtcagtacccggtacggcggcagcggcgcaggcagcacctcatccgcttccggcacccgctcacaccaaccgagcagccaccacggcccctgcggactgtttgtcgccagataacgatgcggacttaagcggagttcttccggcagcgcctgccagagtgcggccagccggtgaccttcatccagtttcgccacgccgccgcgcaccagccacagtgactcgctgcggctgtaaccgtcctcaccgggaaacaggtgctcaaaatacaggcttctgccgccgttatcactgagtatcagtgtgttatcgcgcagctgtaagcggatatccgcaggcattttccagccggggccgaggctccccaccggcgcgggcgtttttgtccggtaactgctgtaggtgcgggagaggatgaacggcagcgggccgggcagggcgatgtcggtttcaccgggaaggacctttgcaccgagcaggggattgaccggatggccggacgtcactccgccggggcacaccgaacaggccacgccggtgggggcaccaatacgtaccccggctgaaccctgaacaatgctaccgccatactgcgtcatgtcaccctgacgcgccgccggttttccgctcatcgtaaaatccttttctattattttaatgacagtatcttcatacgaaaaagcgaagaaaaacttgtggtcacaatgaattgaagatttttaggaatatatttagaacgttacaaaagagaaggttcggatagggtatttagagaggaatcaggtgtgctagtggccctttgttgatcgttcaccaaaggacccaataatagactcaatcttccttcggcaagcactgcaaatgcccgtgccgcacgccgcgctgggcgataacgtcatcggcaaaatgctgcacgtcacccatgtcacctttcaacacggcgatttccagacagtcgtcgtggttgatgtgcacatgcagcgtggcgacggagaggtcgtggtgatgatgctgggtggagacaatgcggctggctaagtcgcgtttttcgtgttcatacacatacgacagcaccgcgaaaccttgcgtgccgtgctgctgggtggcctcttgcgccagggcgctacgcagaatgtcgcggatagcttcggaacggttgttataaccacgacgctggctcaggctgtccagcgtctccagtaaatcgtcatcaagcgtgatggtgactcgttgcatttgcgttaaaccttttctgtggtgcgacggcgcacggggaatgcgggtaataccgcgttttgtagcacacgtccggcgtcagaggaaaaggttaatttctctcccaccacctgggtttcgacgatttgtccgttgtccataaccattacccgctggcaaaagcgttctaccaggcgtaagtcgtgggtgatgaacaggcaggcggtgccaaactgttgttgtagctttttcagcaggcgaatgacacccgcctgtaacacgagatcaaggttagaaacggcttcatccagaatcagtagtttcggttcgaccgccagcgcgcgagccaggcagacgcgctggagctggccgccgcttaactgcggtgggcgtttgtcgagaacgctgtcatcgagatcgaccgccttcagcatttcgctggcgcgcgccagttgttcggattttttcagtgatagcaggtggcgcatcggttcacgcaggatctcgcgcacggttttgcgcggattcacggcgctgatggagtcctgaaataccatctgaatatcgcggcggaacgctttacgctgggcgcgattgagtttcgccagcggttcgccacgccagctaatattcccctgcgcgggcgattctaaacccaccagcaaccgcgcgagggtacttttcccgcagccgctgcgccccagcagggcgacggtttcgccgcttttcagggtcagggaaacgttattcagcaccgcctgatgttgatgttttccgttaaatccaccgtgcgcatagtgatgggaaaggccggagatgttaagtaaagtcatgatgccagctccataccgtagagggcgagatgagcggaaaccaggctgcgcgtcactgtatgtttgggggcgttaaacagcgtttctacatcgccctgttcgacaatcttaccgtcagacatcaccgccacgtcatccgccagacgcgccacaacgcccatatcatgggtcaccagcagcattcccggcgcttgtttttgcataatgctttccagcagatcgaggatgcgcgcctgtgctaccacgtcaaggtcggtggtcggttcatcggcgatgataaacggtgattcacacagcaccgccatcgcaatcatcatgcgctgcaacatgccgccgctcatctcgaacgggtacagcttcagcacgcgcgcggcgttttccagccccaccgcttctatggcagcggtaagcgtagcgtcatcggcgggtttccctaacgccaggcaggtttcccgcgcgtgggtgtgcatggtgtgcagtggattaaaggcgctgcgcgggttctgcatgatggtggcaattttgatgccgcgcagggcgcaaggcgaaaccggtttgccatcggctaaaatttcccccgccgtctggcgaacgccagcgggcaaaatgcccagcgttgcggcgcaggttaatgatttcccgctgccgctaccgccgactaacgccagcacgcgcccgcgttgcagggttaacgatacaccgtgtaccagcggctgcgcggcctgtagcgcgatattacgtagttcaatctgttgcggcattagtgtgcgtgctccgtcaccagatgagggtccagatgatcgcgcagtgcgtcacccaccaggttaaaggccatcacgctgataaacagcgccagccccggccagaacatttgcagcggctgggtccagatatactggcgcgcgtcgttaatcatcacgccccattcggcggtcggcgcggtcacaccgaggccaaggaaagacatccccgcgacgtgcagcatcatatggccgatatccagcgttgccagcaccagcagcgaagggatcaccgcgcctgccagatgatcgacaaacacccgcacatggcccgcaccggaaagccgtgacgccagcacaaactcgcgttggcgtagtgaaatcaccaggctgcgcaccatgcgtgcataccacgcccagtgcgacagggcgatggcgataattacgttggtcagcccggtgccgagcacgccaaccataaagaacgacagaatcgaggtcgggaaggtcataaacatatcggcgacgcgcatggtggcctgatcaacgcgcccgccaatcaacccggcgctgccgccaataaccagccctaatgtcagcaccagcagcaggcaggccattaccgaaccgagcgacacgcgggtcgctgccatcagccgcgagaaaatatcgcgacctaagtgatcggtgcccagccagtgctgcgcatccggcgaaagcaggcgcgacggcaaatcaatcgcctgtgggtcatacggcagccaccactggctggtgagcgcaatcagcgccagcagggcgataatgatcagcgccaggcgtaccgaccagcgggaagagaggaaaaagttcacgcgtgcgctccttcatgacgacgaatgcgcgggtccagcgcggcgttgagcaaatcgacaatcaaattacagaccacaaaaaccaccaccatcatcagcgtaaagcactggatcaccggatagtcacggttaaaaatcgccgacaccgcatagcgcccgacgcccggccaggcaaagatgttttcgataatcatcgtcccgccaatcagttcgccgatatgcatccccacggcggtgatcatcggcagcgaggcattgcgcaggatgtggcgacgttcggtctgtttgtcgttcaggccgcgcagacgcgcccaggtgacgtgacgctgaccggcgacgtccagcatactggcgcgcagtaaacgcgcgttaatcgccagcgacataaaggcaatggaaaccgcaggcaaaatgatgtgctgccagccgccgtaacccatcgcgggtagccattgcagatacaccgaaaacgccatcaccagtaaaaacgccagccagaagttaggcatcgacacgccaagaaacgcgatgaaacgtacggcgaaatccggcagacggtcgcgatggcgcgccgcccagataccgagcggtacggaagtgagcagaattaataccagcgccgcacctgcaagttccagcgtggcgggcaggaagttcagcatatcgtccagtaccgggcgttggctggcgaatgagataccaaagtcaagatgcagcgccttccacaaccaggtgccgtactggacgtacagcggctgatccagtcccagcatggtgcgggtagaggccagcatctccggcgtcggcggcaggttagacagacgcaaataatcgagcgccgggtcgccggtaccgaggcgcagcatcagaaaaatgatcaccgaggcggcgagcaccatcgggatcagcagcagaaagcggcgtaatacgtaacgcaacattaaggtttcaccggtttaatctgttcgaacggaatttcggtggcgatcggcgcgtaggggatgttacccagctccggttttgataccaccatcattgagatgtaactgataggcagataaaccgcctcgtcatgcagacgggtcagaatgtcgcgatacagcgcctgacgttgcgtttcgtcatgggtcgccagcacttcgccgatctctttatcaatcagcggtttgtcggctaatccttgctgtgcctggaagtcagcgtgtgacggtacgcgcattgaactgaggaaggcgtgtggatcatatggcgcgccccaggtgcggtggaaaatcatgccaaaacgaccgtcgcgctgacgagcatagatactgctctcttcttcgccaatcagcgagacatctgcgccaatctggcgcatatcagcctgaatgatttccgccatcgatttgcttaacgcatcggtgccgatgaacgaaagttcaatgcgcagcggctgaccatttttctcgcggatgtctttgcccgcaggcagcgtccaaccggctttttccagcaacgctttcgctttttgcggatcgtactggctcggtttcaggccgaggttggcgtagggcacagaaggggcaaacagggtgtcggcgacctgctgggtgccatacaacgcgttatcaatcagcgattttttgtttaccgcgtaattaagagcttcacgtactgccagctcgttggtgggggctttggcggtattgagcgccagcatcacggtttcgatcggctgtgacagttgggtgtggtaagccggattctggctaaagcgggcgaaggtatcgagcggtaataacccttcgtttccgtacagcaggtcgatatcgccagtttcaaacgccaccgcgcgggtagtcgggtccgggatgacgttaaaggtgatctttttaatcgctggcttttcgccccagtagttttcgttacggacgaagacatcgtactgattcagtttcgattcctgcaaaatccacggtccggtgccaatcggcgctttaattccgttcatggtttcatggtttttaaactgcgagggagcgataaaacggaaaggacggggcagggccagttcttgcaggaaaggatagtaggcgcttttcagggtaatttgcagctctgttttactgagtgctttaacatcaacaatctggtttgccagctccagccaggcgtgacgttgacggttatcgagcactgcgcggaagttttctgccgccgcctcggcatcgaacggttcaccgttggagaatttcacgtcatcacgcagggtgaaggtccaggttttaccatcttctgaatgagtccagctttttgccagccacgggatcaccgaaccgtctgcctgatatttcaccaatggttcataaaccatgctctgggcgaacatctggttaggcgtgtaaaggtgcgggtttagtggcccgacattcaccggccaggcggtggtgatttcatctggtgcagcggcatggacgataaaagacgcacaagccagcagcgcaaatagagtgcggcggagtgtggagagcatggtaaccccaatggattaaaatagatggcggaaataagtatgacgattttaagtattcgtcatactgattacctgttctggatcaatagatgggcagtcgggtgggcggatcagttaactgaatcgatccattgcacactgtcggcggtgagcgtaaagggagtaggggtgcagatcgcaaggcttaaattttcaagctgacaatggctgactgacagcgaggagtgataggtgctgtctacgctgacgatttgccaggcgctgccgccacgctgtttaacgatggcttctttgcgcgtccagatgcgccagaacatttccagttgctgatcaggatgcacggcgtccatctcagcgtgttccccgaggctgaatacggcgttcgccagccagcgccagttggcgcgcgggcgaatcacttcgatatcgcagccgacttcgccttcatcactcaacagcagggcgatatcgtcaccgctatggcttaagttgaaccatagcggcatttccggcgcaaatgcaggtttgccttgttcgccatagatgatctccggtagcggggaaagcgtgtgcgaaagcaatgcacgccccgccagccagcgttcgcgtcgtggaccttgcggtgcttgctcgcgtaaacccggtggcagtggagctgcgcttaaggtcgaaactttccccagaactatccgatacatatcagggccaacgtttaatggaaaatgaaagtgcgtatcgtatcacttgtcgcctcatcccggtaaccgacttttcggtctgcccggccccagtaaaatcgccagtttgctaccgcctttggtggtttccatccagattttacacacgctggttaatggcaccgaaagtagcatccctaccgggccgagcagccatccccaaattaacaatgaaagaaataccaccatggtggacatccccaggcgatggcccatcatccgtggttctaaaatattgccgatgaccatatggaccactaaaaacaatgcgccgaccagaatacattcgtaaacaccattaaacagcagcacctgaatcattggcggtacggcggaaattaccgcgccgatattgggcacgtagttgagcaaaaacgccagtactgcccacatcagcgcaaactgcacccccatcagctccagccccagccagacgatgacacctgtccataaactgagtagcgtcttcaatgcaagatagtgcgaaacgcctttaagtgcgcggtgtaatcccgcgatgtgaatctgtggattattcagcgcaaaacgcattttgtaagggacgtggcgcacttcaaacagcataaaaactacggtcatcaccagcaaaagcacgctcgccattgccccggaaagcccggtcattagcgctgtggtgaaggtaaccactttttccgagtccatccgctgcagcattcgctccggcgacatatgcaaattaagaaaaggcaacatctcctgcaatttaaaaagtttgcgcgtcagctccttattaaacttcggcagcatagagataaattcgttaaacgatgccgccagtacgccgaccagcgcggttagtgcgatcagcatcaccaccactacaatcgtaatggcaacggggcgttgtactccccgacgaataaaccaggtgacgagcgggttgaggacgatggcaaaaaacagcgccagtaacagctgcacaatgatatctgccgctgcgtgaatgcccgcgaggatcactaccagcgaggccagcttgagcagaatgtgcatgcccgttttatcgggttgaggggtttccattggggcttccttgtgactttttgtattaagtgtagcgggagtcacgccagcaatattctgattcttactgctgattttcacgtcagcacgtggtaaaaatgaaacactgttgtaaaaatgtggtgatcctcatgcccgaacccgtagccgaacccgcgctaaacggattgcgcctgaatttgcgcattgtctctatagtcatgtttaacttcgccagctacctcaccatcgggttgccgctcgctgtattaccgggctatgtccatgatgtgatgggctttagcgccttctgggcaggattggttatcagcctgcaatatttcgccaccttgctgagccgccctcatgccggacgttacgccgattcgctgggacccaaaaagattgtcgtcttcggtttatgcggctgctttttgagcggtctggggtatctgacggcaggattaaccgccagtctgcctgtcatcagcctgttattactttgcctggggcgcgtcatccttgggattgggcaaagttttgccggaacgggatcgaccctatggggcgttggcgtggttggctcgctgcatatcgggcgggtgatttcgtggaacggcattgtcacttacggggcgatggcgatgggtgcgccgttaggcgtcgtgttttatcactggggcggcttgcaggcgttagcgttaatcattatgggcgtggcgctggtggccattttgttggcgatcccgcgtccgacggtaaaagccagtaaaggcaaaccgctgccgtttcgcgcggtgcttgggcgcgtctggctgtacggtatggcgctggcactggcttccgccggatttggcgtcatcgccacctttatcacgctgttttatgacgctaaaggttgggacggtgcggctttcgcgctgacgctgtttagctgtgcgtttgtcggtacgcgtttgttattccctaacggcattaaccgtatcggtggcttaaacgtagcgatgatttgctttagcgttgagataatcggcctgctactggttggcgtggcgactatgccgtggatggcgaaaatcggcgtcttactggcgggggccgggttttcgctggtgttcccggcattgggtgtagtggcggtaaaagcggttccgcagcaaaatcagggggcggcgctggcaacttacaccgtatttatggatttatcgcttggcgtgactggaccactggctgggctggtgatgagctgggcgggcgtaccggtgatttatctggcggcggcgggactggtcgcaatcgcgttattactgacgtggcgattaaaaaaacggcctccggaacacgtccctgaggccgcctcatcatcttaaaacttactgaataaccagcgtattaatgatgttttctgcggtggtctgcgctttttgctgatcgtcagcgggcagcgtaatttgcatggtcagcagttgattacccacgttacccagaataacggaagagtacgccgtctggcctttcgcggagataatactgtctaactgctgcattttgtgacctttcagctcaatggctttattggttaccacttgcagctgcggatcgcggctacgttgctgatcttccagacgcttcgccagcaccgccagatcttctttcggatcatcgcccatgatgacgatgactgctttctgcccggtggcgtcggaccagacatgcatgttattggcctgcgttcccagcttaccgctctggtcggtcatatccgctggcagcgagaaacttaacttgccatcaagcaggttgacgggattcccggtagcgttactttccgcgaccgaaccctgcgccgtagcgttagtgtctttatcatcacaggccgcaagccccataaccagcaggccaattccgacatatttaaccagattgcgcattgacttcttcctttcgataaacggccataacggctcattcatccatcttatcacaactctgataacgaacctttaactcgcctgcaaagcgttgatttcggatttatctgccagtcttttcaacagcatattgagtaatacgccatacattggcaggaagaaaacgatactgattaacactttgaaacagtaatcgaccagcgcgatttccatccagtgttcagccataaaggcatccgggctacgccagaaggcaatgaagaaaaaggccagcgtgtcgctgacgttaccgaacagtgtggacgctgtcggtgccagccaccagcggcgactctgacgcaggcggttaaaaacgtgcacgtcgaggatttgccccagcgcgtaggccatgaaactggcggtggcgatacgggcgacaaacaggttgaagtgggcgagtgcgccgaatccctgccaggaacccatatagaatagcgacgagatgacgtaggagattaataacgcagggatcattaccgcgaagataatgcgtcgggccagcggtgcgccaaaaatacgcacggtcaggtcggtagcaagaaaaataaacggaaagctaaacgcgccccaggtggtatggaaacccaaaatggagacgggaagctgaaccagatagttactggaggtgatcaccagcagatgaaataacgataaccagaacaacgccttatagcgttgagtttgcgagaaaacgttcatattgtacctttttgattaaccattggggtgagggaacccaatacgtacgacacgtctgttaccttaacataataacgtgcttacccttttttcgagccgccgcatgatactgctttacgttgacaatgcaatggttaattttcacgcaatcgttaacctagtttgcttacggactcacagggcgtaaactagcgccgtttttttaagtgatgagaagaaaatgaccgatctcttttccagccctgaccacacactcgacgcgcttggcctgcgctgcccggaaccggtgatgatggtgcgcaaaaccgtgcgcaatatgcagcctggcgaaacgttgctgattatcgccgacgatccggccactacccgcgatattcctgggttttgtacctttatggaacacgaactggttgctaaagagacggatggactgccttatcgttatttgattcgtaaaggcggttgataggggctgattggcttcgatgccgccttttcccctcaccctaaccctctccccagaggggcgaggggaccgatcgcgctcaatgttgcgatcggtttgccttatctcctgcgcaacaatcttaacgcattcgctgtcaccagcaccgtcgcccccgtatctgccagcactgccagccacaacccggtcatccctaacagcgtggtgacgaggaagatccctttcagccccagcgcaatagtgatgttctggcggatattggcgtgagtggcgcgtgccagttcaatcatttgcaccaggccgcgcaggtggttatgggttaatgctgcgtcggcggtttccagcgccacgtctgtgccgctacccattgcaatcccgatggcggcagctttcatcgctggcgcgtcgttaataccgtcaccgaccatcgccagcggcgcatgttgattcagctcggtcaccgctttgactttatcttccggcaacaggcccgctttaaactccagccccagctccccggcaattgccgccgctgcgcgtggattatcgccggtgaggatcacccctttgacgcccagcgcgttcagttcactgatggcagttgcagcatcggcgcgcagggtatcctgtaacgcaatgacaccaagcacgtcatcgttacgtactaccagcactaccgtttgcccggcgctttccagttcgttaattaaaccagtaaatgcatcagcgggatgtttcccggcagcgcaaatcaatacgcgctcaccgttaacctgcgcttcaatgccagacccgaccagcgcccgctgtgattcggcggtgggaatggcgagttcagcaacctgtgcttcgcgtacgatggcttgcgccagtggatgcgtcgcgccttgctcgaccgccgccgccagtgtcagcagttcagattcactaatacccgttgccggatgaatcgcggtaacgcgcggtttaccgacggtcagcgtaccggttttatcaaacgccacctgagtaacacgacccagctgttccagcgccgctccgcctttaatcaacgccccacgacgcgctgccgccgccagcccggaggtaatcgccgcaggcgttgagataactaacgcacacgggcagccaatcagcagcagcgtcagccctttataaatccactcctgccagctggcggcaaacagcagcggtggcaccagcgtcaccagcagagcgacggccataatcgcgggcgtatagatacggctgaaacggtcgataaaccgctcaatgggagcgcgacgctcttcggcttcttcgatcagtttcagaatccggtcaatggcgctggctcccggttctgacagcacttccaacgtcaccagacggtctacgctggtggcaccagcagggactttatcgcccgttgcgcgctccaccggaatggattcgccggtcagggcgctttcatcaaaactggcaaacggtgagagcagtttaccgtcggcaggcaaacgcccacctgcggcgacttcaatcacatcgccagggcgcaggctgttaatcgccacctcttcccgctcacccttacgcaggcgcgtggcggtttctggtttcagcgccattaacgcgctaacgccctgacgcgcgcggctggcggcccagccttccagtcgttcaccaatcaaaaacagcagcaacaccatcgcagcttcagccgttgcgccaataaacagtgcaccaatagcggctacgctcattaaggtttcaatggcgaagtagctgccggatttgatcaaccgtaatgcctgacgagcaatcgggtacagcccaaccagcgtggtcgcgataaacgccagttgcccgaacggatgattgaactgctccagaccccagctgattgccatcatcacgattagcgtaatcagcggcagattctctttcaggcgtgatgcttgcggttcttcggcggcctgttcatcgcgcagggaatagcctgctttttgcagcgcagattcaacttgtgcacgaatgtcattgtcggcatcgaccaccagtttttcggtggcgaacaacacctgcacctgattcacgcctgcaagctggcgcacggcattttctaccttgcgcgcacaggcggcgcagtccatgccgctgactttccagctatagcgggtgccggagacgttttcagagagagttggcgtgctggaacatgcgccgtcgcagcaacagtcgttggcgttctgtaccgtggttagcggtttgaacgcagcaaattgaggggctttcttgccgtgattgtcaggagtcgacatggcatcctccggttaagttttttctcattaaccgaaggatacactctggagtcgactccagagtcaagttttatcagagatacagcgagcggacgatcaggaagtgaccggcaaagtagcaggccgcagcaatcgcgttatccgcacggaagcgtcggcgatagtggctccccagccagacaaagttactgataaacagcaacgaagcgccaacaaacgcagagagcgccggagcggtcggacggaagaaccacagttcacctgccagccacaccatcaccagcgtcatgccgataaacgtgcagataggccaacggtactcttccaggcgcgtccagataatcgccagtaacagcgcacccagaaccagcagcaccagtggtagaggccagaagaaagagagcgtcatctgactggcgaaatagatggtgtacagcaggtgcgagaggaaaaacgcgccgatggcgtacatcagacgttgacgtggcaacagggttagcgcatcgcccagcagtgaggcgcacagccctgccagcaccagatagctaatggcgtcgaacatcggcgcttgccaggccagtaacagcaggagaagaagggttaacggtttaaacacccagcgttgccaggttggcccacgatacgatgcatccacagatagccatgcggaaagacagacagcgataaacgaccaaagcatcttagttccttgaattcgttattttttcgtaagcggaatgcctacggtcttgcttccagtttagtggcgagggtggacggatgacaacaccataactggcagggtatgcttatttccgcattttccgatgagggataaagatgagcaaaccacctcttttctttattgttatcattggcttaattgtcgtcgccgcatcgtttcgttttatgcaacagcgacgggaaaaagctgataatgatatggctccgctccagcaaaagctggtggtggtgagcaacaagcgggaaaaaccgattaacgatcgccgttcgcgccagcaggaagtgactccggcaggcaccagtatacgctatgaggcaagcttcaaaccgcaaagcggaggaatggagcagacgtttcgcctcgacgcccagcagtaccacgccctgacagtgggcgataaaggtacgctgagctataaaggaacgcgctttgtcagctttgtaggcgaacaataaggttattttttaactttaaatttcttctgccaggccagcagttcaaacacgccgaaaaggaaaatccgtaccttttcggcggtggtcatctgcgggccatctttcggtaaagtggatttcaatagcgccagctgcataccatgcatcagcacggtaaaaatcagcgccacgttaacgaagatattcagcgggcgtgggaagggatgcaccaggttgaggattaaaaatccccaaacgcagagcattaacaaacgaccaatattaatcagcatcactttctccttgtgcttcgcgttgatacagccgataagccacctgacccgccactttttcccgatgtaatgaccagtttgctggaacagtgggcagaccgttttcgacttcgctttcgacataaatcagggcttcgtcagccagccagccgttatcttccagtaaatttatcgtctcttctaacaagccacggcggaacggtggatcgacaaacacgatattatgcggtgtacctttttgcgccaggaatgacatcgcgttgctgttcaccacgcgtgcattgcctgcttttagtgtcgccagattcttaattaactgctgagaaaccgcgcgatccatctcaatcaacgttgcccccgcagcgtagcgcgataacgcttccagccccagcgcgccgctcccggcgaagcaatccagacattgggcgtcaacaatgaccggagccagccagttaaacaacgtttcgcgtacgcggtcggtggtggggcgcagacctgggctatcaggaaccgggagtttacggcctcgccactgcccgccaataatgcggatttggccgctgccggaatgattcggttttttcatgataaattgctcaatccgccagataacacatacttgcaggcggtgatgtgaattaagttaagtgatagactatttcatcatttttttagctgctatgtacatagcgttaacgctgtgccatgaagcaacagcgaggagtgtagtcgcaaatggcgaaagaaaaaaaacgtggctttttttcctggctgggctttggtcaaaaagagcagaccccggaaaaagagacagaagttcagaatgaacaaccggttgtagaagaaatcgttcaggcgcaagagcctgtgaaggcctctgaacaagccgttgaagagcagccgcaagcgcatactgaagccgaggcggaaacttttgctgccgacgttgtggaagtcactgaacaggttgctgaaagtgaaaaagcgcagcctgaagcggaagtcgttgcacagccggaaccggtcgtagaagaaacgccggagccagtggctatcgaacgtgaagagctgccgttgccggaagacgtcaacgccgaagcggtttcgccagaagagtggcaggctgaagcggaaaccgtagagattgtcgaagcggcggaagaagaagcggctaaagaagaaattaccgacgaagagctggaaacggcgctggctgccgaagcggcagaagaggcggtgatggtggttcctccggcagaagaagagcagccggtggaagaaatcgctcaggagcaggaaaaaccgaccaaagaaggttttttcgcgcgcctgaaacgcagcctgttaaaaaccaaagaaaatctcggttccggatttatcagcctgttccgcggtaaaaaaatcgacgatgatctgtttgaggagctggaagagcagcttttgatcgccgatgtgggtgtggaaaccacacgtaaaattatcaccaatctgacggaaggcgcatcccgcaagcagcttcgtgacgccgaggcgctctatggcctgctgaaagaagagatgggcgagattctggcgaaagtcgatgagccgctgaatgttgaaggcaaagcgccgtttgtgatcctgatggtgggcgtcaacggtgtgggtaaaaccacgacgattggtaagctggcgcgtcagtttgagcagcagggtaaatcggtgatgctggcggcgggtgatactttccgtgcagctgcggttgaacagcttcaggtctggggtcagcgcaacaatattccggtgattgcccagcataccggggcggattccgcctctgttatcttcgacgccattcaggcagctaaagcgcgtaatatcgacgtcctgattgccgatacagccggacgcctgcagaacaaatcgcacctgatggaagagttgaagaaaatcgtccgcgtgatgaagaaactcgacgttgaagcgccgcatgaagttatgctgactattgatgccagcaccgggcagaacgcggtaagccaggccaaactgttccatgaagccgttggcttaaccggcatcacgctaacgaaactggacggcacggcgaaaggcggggtaattttctcggtggctgaccagtttggtatccctatccgctacattggtgtcggcgaacgtattgaggatttgcgtccgtttaaggcggacgactttatagaggcactttttgcccgagaggattaacaatgattcgctttgaacatgtcagcaaggcttatctcggtgggagacaggcgctgcagggcgttacgttccatatgcagccgggtgagatggcgtttctgaccggtcattccggcgcagggaaaagtaccctcctgaagctgatctgtgggattgagcggcccagcgccgggaaaatctggtttagcggccatgacatcacgcgtctgaaaaaccgtgaagttccgtttctgcgccgccagattggcatgattttccaggatcaccatctactgatggaccgtactgtctacgataacgtggcgatcccgctgattatcgccggtgccagcggtgacgatattcgtcgccgggtgtcggcggcgctggataaagtcgggctactggacaaagcgaagaacttccctattcagctttcgggcggtgaacaacagcgtgttggcattgcccgcgcggtggtgaacaagcccgcggtactgctggcggacgaaccgactggtaacctggacgacgcgctgtcggaaggcattttacgtctgtttgaagagtttaaccgcgttggggtaaccgtattgatggcaacgcacgacatcaacctgatctcgcggcgttcctatcgcatgctcaccctgagcgatggtcacttgcatggaggcgtgggccatgaataagcgcgatgcaatcaatcatattcggcagtttggcgggcgtcttgatcgcttccgtaaatcggtcggcggctcaggcgacggcggtcgtaacgcaccaaaacgcgcgaaatcctcgccaaaaccggtaaatcgcaaaaccaacgttttcaacgaacaggtgcgctatgccttccacggcgcattgcaggatctgaaaagcaaaccgttcgccacgtttttaacggtgatggttatcgccatttctctgacgctgcccagcgtctgttatatggtgtacaaaaacgttaaccaggcggcgacgcagtattatccgtcaccgcaaatcactgtttatctgcaaaaaacgctggacgatgacgctgctgcgggcgtggtggcacagttgcaggccgagcaaggcgtggagaaagtgaactatctttctcgtgaagacgcactgggtgagttccgtaactggtctggttttggtggtgcgctggatatgctggaagaaaacccgcttccggcagtggcggtggtgatcccgaaactcgatttccaggggacggaatcactgaatacgctgcgtgatcgtatcacgcagattaacggcattgacgaagtgcggatggatgacagctggtttgcccgtctggcggcgttgaccgggctggtcgggcgcgtttcggcgatgatcggcgtgttgatggtggcggccgtgttcctcgtcatcggtaacagtgtgcgtctgagtatctttgctcgccgtgactccattaacgtacagaaactgattggtgcgacagatggattcatcctgcgcccgttcctgtatggtggcgcactgctgggattttctggcgcattgttgtcattaattttgtcagaaattctggtgctgcgattgtcatcggcggttgcggaagtggcacaggttttcggaacgaagtttgatatcaatggcttatcattcgatgaatgcctgctattgctgctggtatgctcgatgattggctgggtggcagcgtggcttgccacggtacaacatttacgccactttacgcctgaataataaaagcgtgttatactctttccctgcaatgggttccgtagcagggaaagagaccccgttgtctcttcccggtatttcatctctatgtcacattttgtgcgtaatttattcacaagcttgcattgaacttgtggataaaatcacggtctgataaaacagtgaatgataacctcgttgctcttaagctctggcacagttgttgctaccactgaagcgccagaagatatcgattgagaggatttgaatgactgacaaaatgcaaagtttagctttagccccagttggcaacctggattcctacatccgggcagctaacgcgtggccgatgttgtcggctgacgaggagcgggcgctggctgaaaagctgcattaccatggcgatctggaagcagctaaaacgctgatcctgtctcacctgcggtttgttgttcatattgctcgtaattatgcgggctatggcctgccacaggcggatttgattcaggaaggtaacatcggcctgatgaaagcagtgcgccgtttcaacccggaagtgggtgtgcgcctggtctccttcgccgttcactggatcaaagcagagatccacgaatacgttctgcgtaactggcgtatcgtcaaagttgcgaccaccaaagcgcagcgcaaactgttcttcaacctgcgtaaaaccaagcagcgtctgggctggtttaaccaggatgaagtcgaaatggtggcccgtgaactgggcgtaaccagcaaagacgtacgtgagatggaatcacgtatggcggcacaggacatgacctttgacctgtcttccgacgacgattccgacagccagccgatggctccggtgctctatctgcaggataaatcatctaactttgccgacggcattgaagatgataactgggaagagcaggcggcaaaccgtctgaccgacgcgatgcagggtctggacgaacgcagccaggacatcatccgtgcgcgctggctggacgaagacaacaagtccacgttgcaggaactggctgaccgttacggcgtttccgctgagcgtgtacgccagctggaaaagaacgcgatgaaaaaattgcgtgctgccattgaagcgtaatttccgctattaagcagagaaccctggatgagagtccggggtttttgttttttgggcctctgtaataatcaatttcccctccggcaaaacgccaatccccacgcagattgttaataaactgtcaaaatagctattccaatatcataaaaatcgggtatgttttagcagagtatgctgctaaagcacgggtagtcatgcataaaacgaaataaagtgctgaaaaacaacatcacaacacacgtaataaccagaagaatggggattctcaggatgaacataaagggtaaagcgttactggcaggatgtatcgcgctggcattcagcaatatggctctggcagaagatattaaagtcgcggtcgtgggcgcaatgtccggtccggttgcgcagtacggtgaccaggagtttaccggcgcagagcaggcggttgcggatatcaacgctaaaggcggcattaaaggcaacaaactgcaaatcgtaaaatatgacgatgcctgtgacccgaaacaggcggttgcggtggcgaacaaagtcgttaacgacggcattaaatatgtgattggtcacctctgttcttcatcaacgcagcctgcgtctgacatctacgaagacgaaggcattttaatgatcaccccagcggcaaccgcgccggagctgaccgcccgtggctatcagctgatcctgcgcaccaccggcctggactccgaccaggggccgacggcggcgaaatatattcttgagaaagtgaaaccgcagcgtattgctatcgttcacgacaaacagcaatacggcgaaggtctggcgcgagcggtgcaggacggcctgaagaaaggcaatgcaaacgtggtgttctttgatggcatcaccgccggggaaaaagatttctcaacgctggtggcgcgtctgaaaaaagagaatatcgacttcgtttactacggcggttatcacccggaaatggggcaaatcctgcgtcaggcacgcgcggcagggctgaaaactcagtttatggggccggaaggtgtggctaacgtttcgctgtctaacattgcgggcgaatcagcggaagggctgctggtgaccaagccgaagaactacgatcaggttccggcgaacaaacccattgttgacgcgatcaaagcgaaaaaacaggacccaagtggcgcattcgtttggaccacctacgccgcgctgcaatctttgcaggcgggcctgaatcagtctgacgatccggctgaaatcgccaaatacctgaaagcgaactccgtggataccgtaatgggaccgctgacctgggatgagaaaggcgatctgaaaggctttgagttcggcgtatttgactggcacgccaacggcacggcgaccgatgcgaagtaatcattaatcggcaactttgggttgccgccaaattgctaatatcgagtacgttgcttcatgccggatgcggcgtaaacgccttatccggcctacaagatccaaagaaatcagtaaattgcaacacacattgtaggcctgataagcgtagcgcatcaggcaatatcacttttgaaatcaaacttgacgattaacacttctcccagccgccctgttgtgccgtaaaccccagcgcctgcataaacgccgtcatcacaccgcgatcttccacgcctgcatccgccatccaccagcatgaaacgccaggattgttacgcaaaacctcttccagcagatattgccccacaccgcgacggcgggtgacttcccgcacgcgcagggaatccagtgctccctcggtgccgcttaaggttacccgcacggcagcgagcaggcgctcgttaaaacgcgcggcgtagatacggtggttatcgtcaacctgtaacgaggaaggggaatactccggccagatcttttgcaggtcaatccggtcttggtcgctaaatttttctaatcgaatgatggtcagcttcatgggtaacccgtgtaaatcacaaaagtggaaccagtgtagcgaaataatttaatcggaggctttctcttttttatttcttttggcaggtgattaattttttaacagcaataattacaaaattaaaacattagagaatgaaaaatgtccagcataatcccctgaatgatagtgaattattccgccctttgtgccgttattttatgctgacaaaggcacttttttctgtttatctatcaataaattcagaatattatctgttcttaatcgactgaaaaatagggattttaatcgctattatcacaaaatactgcgctaaccccttaatcagacaggcaaaaacagtgcagtataaaaaaagaacagtctgatttgttaacacataaaaacaaagcaacacaacatcacgaatggggatttttgactatgaaacggaatgcgaaaactatcatcgcagggatgattgcactggcaatttcacacaccgctatggctgacgatattaaagtcgccgttgtcggcgcgatgtccggcccgattgcccagtggggcgatatggaatttaacggcgcgcgtcaggcaattaaagacattaatgccaaagggggaattaagggcgataaactggttggcgtggaatatgacgacgcatgcgacccgaaacaagccgttgcggtcgccaacaaaatcgttaatgacggcattaaatacgttattggtcatctgtgttcttcttctacccagcctgcgtcagatatctatgaagacgaaggtattctgatgatctcgccgggagcgaccaacccggagctgacccaacgcggttatcaacacattatgcgtactgccgggctggactcttcccaggggccaacggcggcaaaatacattcttgagacggtgaagccccagcgcatcgccatcattcacgacaaacaacagtatggcgaagggctggcgcgttcggtgcaggacgggctgaaagcggctaacgccaacgtcgtcttcttcgacggtattaccgccggggagaaagatttctccgcgctgatcgcccgcctgaaaaaagaaaacatcgacttcgtttactacggcggttactacccggaaatggggcagatgctgcgccaggcccgttccgttggcctgaaaacccagtttatggggccggaaggtgtgggtaatgcgtcgttgtcgaacattgccggtgatgccgccgaaggcatgttggtcactatgccaaaacgctatgaccaggatccggcaaaccagggcatcgttgatgcgctgaaagcagacaagaaagatccgtccgggccttatgtctggatcacctacgcggcggtgcaatctctggcgactgcccttgagcgtaccggcagcgatgagccgctggcgctggtgaaagatttaaaagctaacggtgcaaacaccgtgattgggccgctgaactgggatgaaaaaggcgatcttaagggatttgattttggtgtcttccagtggcacgccgacggttcatccacggcagccaagtgatcatcccaccgcccgtaaaatgcgggcgggtttagaaaggttaccttatgtctgagcagtttttgtatttcttgcagcagatgtttaacggcgtcacgctgggcagtacctacgcgctgatagccatcggctacaccatggtttacggcattatcggcatgatcaacttcgcccacggcgaggtttatatgattggcagctacgtctcatttatgatcatcgccgcgctgatgatgatgggcattgataccggctggctgctggtagctgcgggattcgtcggcgcaatcgtcattgccagcgcctacggctggagtatcgaacgggtggcttaccgcccggtgcgtaactctaagcgcctgattgcactcatctctgcaatcggtatgtccatcttcctgcaaaactacgtcagcctgaccgaaggttcgcgcgacgtggcgctgccgagcctgtttaacggtcagtgggtggtggggcatagcgaaaacttctctgcctctattaccaccatgcaggcggtgatctggattgttaccttcctcgccatgctggcgctgacgattttcattcgctattcccgcatgggtcgcgcgtgtcgtgcctgcgcggaagatctgaaaatggcgagtctgcttggcattaacaccgaccgggtgattgcgctgacctttgtgattggcgcggcgatggcggcggtggcgggtgtgctgctcggtcagttctacggcgtcattaacccctacatcggctttatggccgggatgaaagcctttaccgcggcggtgctcggtgggattggcagcattccgggagcgatgattggcggcctgattctggggattgcggaggcgctctcttctgcctatctgagtacggaatataaagatgtggtctcattcgccctgctgattctggtgctgctggtgatgccgaccggtattctgggtcgcccggaggtagagaaagtatgaaaccgatgcatattgcaatggcgctgctctctgccgcgatgttctttgtgctggcgggcgtctttatgggcgtgcaactggagctggatggcaccaaactggtggtcgacacggcttcggatgtccgttggcagtgggtgtttatcggcacggcggtggtctttttcttccagcttttgcgaccggctttccagaaagggttgaaaagcgtttccggaccgaagtttattctgcccgccattgatggctccacggtgaagcagaaactgttcctcgtggcgctgttggtgcttgcggtggcgtggccgtttatggtttcacgcgggacggtggatattgccaccctgaccatgatctacattatcctcggtctcgggctgaacgtggttgttggtctttctggtctgctggtgctggggtacggcggtttttacgccatcggcgcttacacttttgcgctgctcaatcactattacggcttgggcttctggacctgcctgccgattgctggattaatggcagcggcggcgggcttcctgctcggttttccggtgctgcgtttgcgcggtgactatctggcgatcgttaccctcggtttcggcgaaattgtgcgcatattgctgctcaataacaccgaaattaccggcggcccgaacggaatcagtcagatcccgaaaccgacactcttcggactcgagttcagccgtaccgctcgtgaaggcggctgggacacgttcagtaatttctttggcctgaaatacgatccctccgatcgtgtcatcttcctctacctggtggcgttgctgctggtggtgctaagcctgtttgtcattaaccgcctgctgcggatgccgctggggcgtgcgtgggaagcgttgcgtgaagatgaaatcgcctgccgttcgctgggcttaagcccgcgtcgtatcaagctgactgcctttaccataagtgccgcgtttgccggttttgccggaacgctgtttgcggcgcgtcagggctttgtcagcccggaatccttcacctttgccgaatcggcgtttgtgctggcgatagtggtgctcggcggtatgggctcgcaatttgcggtgattctggcggcaattttgctggtggtgtcgcgcgagttgatgcgtgatttcaacgaatacagcatgttaatgctcggtggtttgatggtgctgatgatgatctggcgtccgcagggcttgctgcccatgacgcgcccgcaactgaagctgaaaaacggcgcagcgaaaggagagcaggcatgagtcagccattattatctgttaacggcctgatgatgcgcttcggcggcctgctggcggtgaacaacgtcaatcttgaactgtacccgcaggagatcgtctcgttaatcggccctaacggtgccggaaaaaccacggtttttaactgtctgaccggattctacaaacccaccggcggcaccattttactgcgcgatcagcacctggaaggtttaccggggcagcaaattgcccgcatgggcgtggtgcgcaccttccagcatgtgcgtctgttccgtgaaatgacggtaattgaaaacctgctggtggcgcagcatcagcaactgaaaaccgggctgttctctggcctgttgaaaacgccatccttccgtcgcgcccagagcgaagcgctcgaccgcgccgcgacctggcttgagcgcattggtttgctggaacacgccaaccgtcaggcgagtaacctggcctatggtgaccagcgccgtcttgagattgcccgctgcatggtgacgcagccggagattttaatgctcgacgaacctgcggcaggtcttaacccgaaagagacgaaagagctggatgagctgattgccgaactgcgcaatcatcacaacaccactatcttgttgattgaacacgatatgaagctggtgatgggaatttcggaccgaatttacgtggtcaatcaggggacgccgctggcaaacggtacgccggagcagatccgtaataacccggacgtgatccgtgcctatttaggtgaggcataagatggaaaaagtcatgttgtcctttgacaaagtcagcgcccactacggcaaaatccaggcgctgcatgaggtgagcctgcatatcaatcagggcgagattgtcacgctgattggcgcgaacggggcggggaaaaccaccttgctcggcacgttatgcggcgatccgcgtgccaccagcgggcgaattgtgtttgatgataaagacattaccgactggcagacagcgaaaatcatgcgcgaagcggtggcgattgtcccggaagggcgtcgcgtcttctcgcggatgacggtggaagagaacctggcgatgggcggtttttttgctgaacgcgaccagttccaggagcgcataaagtgggtgtatgagctgtttccacgtctgcatgagcgccgtattcagcgggcgggcaccatgtccggcggtgaacagcagatgctggcgattggtcgtgcgctgatgagcaacccgcgtttgctactgcttgatgagccatcgctcggtcttgcgccgattatcatccagcaaattttcgacaccatcgagcagctgcgcgagcaggggatgactatctttctcgtcgagcagaacgccaaccaggcgctaaagctggcggatcgcggctacgtgctggaaaacggccatgtagtgctttccgatactggtgatgcgctgctggcgaatgaagcggtgagaagtgcgtatttaggcgggtaataacacgttgattgatagggagtcaaaagactcctttgagacaggtgacaaatgtaaaattgcctgatgcgctgcgcttatcaggcctactgggtgagtggcaatatgttgaatttgcacgatcttgtaggcctgataaggcgtttacgccgcatccggcatgaaacgatgagcaatctgtagagtttgattcagaccttctatattttcccgcttatccgtgccccatctcccattttccctcacccacgccgtcaccgccttgtcatctttctgacaccttactatcttacaaatgtaacaaaaaagttatttttctgtaattcgagcatgtcatgttaccccgcgagcataaaacgcgtgaattcgcgcattcggtacaacaagagagataaacgatgaaaccgttacattatacagcttcagcactggcgctcggactggcgttaatggggaatgcacaggcagtgacgaccattccgttctggcattctatggaaggggaactgggtaaagaggtggattctctggcccaacgttttaacgccgaaaacccggattacaaaattgtaccgacctataaaggcaactacgaacagaatttaagcgcggggattgccgcatttcgtaccggcaacgcgccggctattttgcaggtttatgaagttggcaccgccaccatgatggcgtcgaaagccattaaaccggtgtatgacgtgtttaaagaggcagggattcagttcgatgagtcgcagtttgtgccgacggtttcaggttactactccgacagcaaaacgggccacttactctcccagccattcaacagctcgacccccgttctctattacaacaaagacgccttcaagaaagcaggattagacccggaacagccgccgaaaacctggcaggatctggcggactatgccgcgaaactgaaagcctccggcatgaagtgcggctacgccagcggctggcagggctggatccaactggaaaactttagcgcctggaacggtctgccgtttgccagcaaaaacaacggctttgacggcacggacgcggtgctggagttcaataagccggagcaggtgaaacacatcgccatgctcgaggagatgaacaagaagggcgacttcagctacgtcggtcgtaaggatgaatccaccgagaagttctataacggtgattgcgcgatgaccaccgcctcttccggttctcttgccaacattcgcgagtacgccaaatttaactacggcgtaggcatgatgccttacgacgccgatgcgaaagatgcgccacaaaacgccattatcggcggagccagcctgtgggtgatgcagggtaaagataaagaaacgtataccggtgtggcgaagttcctcgatttcctcgcgaagccagaaaacgctgccgagtggcatcagaaaaccggttatctgccaatcaccaaagcagcgtatgacctgacccgtgagcagggcttttatgagaaaaacccaggggcggataccgcgacgcgtcagatgctgaataagccgccgttgccgttcaccaaagggctgcgtctgggcaacatgccgcagatccgcgtgattgtggatgaagagctggagagcgtgtggaccggtaagaagacaccacagcaggcactggataccgccgttgagcgtggaaatcagttgctgcgccgctttgagaaatcgacgaagtcttaatcagtgtaatgtcggatgcgtttcgcttatctgacctggcatcgcgtgtaggccggataagcgaagcgcatccggcacagttcaggaattaaccgtaatgtcatcatcccgtccggtgttccgctcgcgctggctgccttatctgctggtcgcgccgcagctcatcatcaccgttatcttttttatctggcctgcgggcgaagcgttgtggtactcgctacaaagcgtcgatccgtttggtttctccagccagtttgtcggcctggataacttcgtcacgctgttccatgacagctactatctcgactccttctggacgacgataaaattcagcacctttgtcaccgtcagcggtttgctggtatcgctgttctttgcggcgctggtggagtacatcgtgcgcggcagccgtttctatcaaaccttaatgttgctgccttacgccgtggctcccgccgttgccgccgtattgtggatcttcctgtttaaccccggtcgcgggctgatcacccattttctcgcggagttcggctacgactggaaccacgcgcaaaacagcggtcaggcaatgtttctggtggtgtttgcctcagtatggaagcaaatcagctacaacttcctgttcttctatgccgcgctgcaatccattccccgttcgttgatcgaagccgcagccatcgacggtgcagggccgattcgccgcttctttaagattgcgctgccgcttatcgccccggtgagtttcttcctgctggtagtgaacctggtgtatgccttcttcgacaccttcccggtgatcgacgccgccacgtccggcgggccggttcaggccaccacgacgctgatttataagatctaccgcgaaggttttaccggactggatctggcttcgtctgccgcacagtcggtggtgttgatgttcctcgtcatcgtgctgacggtggtgcagttccgctatgttgaaagcaaggtgcgttaccaatgattgagaaccgtccgtggctgacgatattcagccataccatgctgatcctcgggatcgcggtgatcctcttcccgctgtacgtggcgtttgtcgcggcgacgctggataaacaggccgtctatgccgcgccgatgacgctcatccccggcacacatctgctggaaaacatccacaacatctgggtgaacggggtaggcacgaatagcgcgccgttctggcggatgttgcttaacagctttgtgatggcgttcagcattacgctcggcaaaattaccgtctcgatgctctcggcatttgccattgtctggtttcgttttccgctacgtaacctcttcttctggatgatttttatcaccctgatgctgccggttgaagtacgtatcttcccgacggtggaagtcatcgccaacctgcagatgctcgacagctacgccggtttaacgctgccgctgatggcctcggcgaccgctactttcctgttccgccagttctttatgacgctgccggatgagctggtggaagccgcgcggatcgacggcgcatcgccaatgcgcttcttttgcgacatcgtttttccgctctccaaaactaatctggcggcgctgtttgtgatcacctttatctacggctggaatcagtatttgtggccgttgttgattattaccgatgtggatctcggcaccaccgtggcagggatcaaagggatgatcgctacaggcgaaggcaccacggaatggaactcagtgatggtggcgatgttgttaacgcttatccctccggtggtgattgttttagtgatgcagcgtgccttcgtgcgcggcctggtcgatagtgagaaataagatggcaggactgaaattacaggcagtaaccaaaagctgggatggtaaaacccaggtcattaaaccgctgacccttgatgtggcggatggcgaatttatcgtgatggtcgggccgtctggctgcgggaaatcgacgctgctgcgcatggttgccgggctggagcgggtgacagaaggcgatatctggatcaacgaccagcgcgtgactgaaatggagccaaaagatcgcgggattgcgatggtgttccagaactacgcgctttatccgcatatgagtgtcgaagaaaacatggcgtgggggctgaaaattcgcggcatgggcaagcagcaaattgccgagcgcgttaaagaagcggcgcgcattctggagctggacggtctgctcaaacgtcgcccgcgcgagctttccggcggtcagcgccagcgtgtggcgatgggccgcgcgattgtgcgcgatccggcggtgttcctgtttgatgagccgctctctaacctcgatgccaagctgcgcgtgcagatgcgtcttgaactgcaacagttgcaccgtcgcctgaaaacgacttcactctacgttactcacgatcaggttgaagcgatgacgctcgcccagcgagtaatggtgatgaacggcggtgttgccgaacagattggcacaccagttgaagtctacgaaaagcccgccagcctgtttgtagcgagttttatcggcagtccggcgatgaacctgctgacaggccgcgtgaataacgaaggcacgcatttcgaactggacggcggtattgagctgccgctaaacggtggctaccgtcagtatgccgggcgtaaaatgactctcggcattcgcccggaacatattgcgctaagctcgcaggcagaaggcggcgtaccgatggtgatggacacgctggagatcctcggcgcagataacctggcgcacggacgctggggcgagcagaagctggtggtgcgactggcgcatcaggagcgcccgacggcaggcagcacgctgtggctgcatctggcggaaaatcagctgcatctttttgatggtgaaacaggacaacgagtatgagtaactggccttatccccgcatcgtcgctcatcgtggcggcggtaagctggccccggaaaacaccctggcgtcaatcgacgtcggggcaaaatacggtcataagatgatcgaatttgacgcgaagttatcgaaagatggcgagatcttcctgctccatgacgacaatctcgaacgtaccagcaacggctggggcgtcgcgggtgaactgaactggcaggatttactgcgcgtggatgcgggcagttggtacagcaaaatgtttaaaggtgagccgctaccgttgctttcgcaggtggcggaacgttgccgcgaacacgggatgatggcgaatatcgaaatcaaacccaccaccggcaccgggccattaacgggcaaaatggtggcgctggcggcacgcgagctgtgggccggtatgacgccgccgctgctgtcatcgtttgagattgatgctttagaagctgcacaacaggcggcaccggaactgccgcgcggtttgttgctggatgagtggcgcgacgactggcgcgaactgaccgcgcggctgggctgcgtctctattcatctcaatcataagttactcaataaagcgcgagtgatgcagttgaaagacgccggactgcggattctggtttataccgtcaataaaccccagcgcgcagcagagttgctgcgctggggtgtggattgcatctgtaccgatgcgattgacgtgattggtccgaactttacggcccaatagttttcaacggaatgtcaggctgcggcgtgctgggctgattcagcatgtcgccgtttctcctctccggcagcatatgctgctgattcaacgaactatccggattacggttgctgtttaacatcccgccgttggtgttgggcagcatttgctgccgggcgggatttcgctcccccggctgtgactgcaacacccgctgagaattattgtttatctggttttctaaatgctgctgttgcaactgagtttgcgttttcagttgctgattcagcatccctttttgctggatttgctgagtctgcatctgggtttgcatccgctgctggctgggtatctgataccccggctggttagggttgttcagagtattaatgggctgtgcaaagccgacaaacggcaggagtgccgtaagaatcagaagtcgtttcatcgcgtatcctcctctgaagatatcctttaagtttactcgcttcccgacaaaacgatgattaattcagagttatataccaggcttagctggggttgccccttaatctctggagaataacgatgataaaaccgacgtttttacgccgggtggccattgctgctctgctctcaggaagttgttttagcgccgccgccgcgcctcctgcgccgcccgtctcgtatggtgtggaggaagatgtcttccacccggtacgcgcgaaacagggaatggtagcgtctgtggacgccactgccactcaggtgggggtggatattctcaaggagggcgggaatgccgttgatgccgccgtggcggtgggctacgcgctggcggtaacgcatccgcaggcagggaatctgggcggtggtggttttatgttaatccgctcgaaaaatggcaataccacggctatcgatttccgcgaaatggcacccgccaaagcgacccgcgatatgttcctcgatgatcagggcaacccggacagcaaaaaatcactcacttcgcatctggcttccggcacaccgggtacggtagcaggtttctcgctggcgctggataaatacggcaccatgccgctgaacaaagtcgtgcagcccgcgtttaaactggcacgcgatggttttatcgttaacgacgcgctggctgacgatctcaaaacctacggtagcgaagtgttgccgaatcacgaaaacagtaaagctatcttctggaaagagggcgagccgctgaaaaagggcgacacgctggtgcaggcgaacctggcaaagagcctggagatgattgctgaaaacggcccggacgaattctataaaggcacgattgcggaacagatcgcccaggagatgcagaaaaacggtggcttgatcactaaagaagatttagcagcctataaagcggtcgaacgcactccgataagcggcgattatcgcgggtatcaggtttactccatgccaccgccatcctccggcgggatccatatcgtacaaatcctcaatattctggaaaacttcgatatgaagaaatacggctttggcagcgccgatgcgatgcaaatcatggcagaagcggagaaatacgcctacgccgaccgctcggaatatcttggcgacccggattttgtcaaagtaccgtggcaggcgctgaccaataaagcctatgccaaatctattgccgatcaaattgatatcaataaagcgaagccatccagcgaaattcgccccggcaagcttgcgccttatgagagtaatcaaactacccattactcagtggtggataaagatggtaacgcggtggcggtgacctatacgctgaacaccaccttcggtacgggcattgtcgcgggcgagagcggtattctgcttaataaccagatggatgatttctccgccaaaccgggcgtaccgaacgtttacgggctggtgggcggtgatgccaacgccgtcgggccgaacaaacgcccgctgtcgtcgatgtcgccgaccattgtggtgaaagacggtaaaacctggctggttaccggtagcccaggcggtagccggatcatcactacagtgctgcaaatggtggtgaatagcatcgattatggcttgaacgtcgccgaagcgaccaatgcgccgcgtttccaccatcagtggttgccggacgagctgcgtgtcgaaaaagggtttagcccggatacgctcaagctgctggaagcaaaaggtcagaaagtggcgctgaaagaggcgatgggcagtacacaaagcattatggttgggccggacggtgagttgtacggcgcatccgacccgcgctcggtggatgatttaacggcggggtactaaggttagcggccctcttcgtgggaagagggctattttgtcagggcaagccgaaggtagccttttttatttcgtaatcctgtagatattcttccagcggttttgccgttcccagagaatgaatttcaccactgtctttatcaataataaaaggtgcgttaccagctaagcgcgcggcctcatctccagtttcgagaaattctcgtgcttcgaaacagaaataccagccctggctaaagcgtccatgtagagtaatgacgaccgggagatctgcatcatcaaggtaatggttcgctttcgcgaatgcgtcgtgataagtaatcataattataataaatattattgttgagtgttatattattattcctgtgtgatacattgagcaaagacgcgttcatcttcgtcaaagatattattaaatgctggttttgaaaaaagttcatcggataagatatagtcacgaaataagtatctgctaatattttatgatttctttttcagaacgtcgaacgggattttcttatttaagatatcagaatcttatgattcgggtaaaattctaaataaatcaacatgtcattaaaatcatcatagccattagctatttcggctaaaatagagactacatgtcttcggtccatctcacttaaggagtgtagttccgttgtaagtttttccatagcttgcactgctaaatttcgaacaaggaattttctgctggtaatctctaaaaagatggcatggtttacaatgatttttgtttccttttgattattatgaacaactgtccatgatttcgtttaagaatgaagagaaatcactaaacgaactgaatatattttctgtgccaatattatctctaatttcaaaaaagttacttttaatgtcggtaatgactccaacttattgatagtgttttatgttcagataatgcccgatgactttgtcatgcagctccaccgattttgagaacgacagcgacttccgtcccagccgtgccaggtgctgcctcagattcaggttatgccgctcaattcgctgcgtatatcgcttgctgattacgtgcagctttcccttcaggcgggattcatacagcggccagccatccgtcatccatatcaccacgtcaaagggtgacagcaggctcataagacgccccagcgtcgccatagtgcgttcaccgaatacgtgcgcaacaaccgtcttccggagactgtcatacgcgtaaaacagccagcgctggcgcgatttagccccgacatagccccactgttcgtccatttccgcgcagacgatgacgtcactgcccggctgtatgcgcgaggttaccgactgcggcctgagttttttaagtgacgtaaaatcgtgttgaggccaacgcccataatgcgggctgttgcccggcatccaacgccattcatggccatatcaatgattttctggtgcgtaccgggttgagaagcggtgtaagtgaactgcagttgccatgttttacggcagtgagagcagagatagcgctgatgtccggcggtgcttttgccgttacgcaccaccccgtcagtagctgaacaggagggacagctgatagaaacagaagccactggagcacctcaaaaacaccatcatacactaaatcagtaagttggcagcatcacctttaatgtcataagtaaatattgaaatgctataatccccgatcactaaccgttcttgtagatcagggtttatgaaatcatcattatttctataaaattcatttacggcaaaaaggtttttaactgaaggttctggaatcgagaggctaaataatcgtaatccattaacttcgaatccatccattgctcttaaaaaagtaagataatcaggttgattcttaaaaagaatactaacttcattacataacttctccaggcaattagttgaattagaattaaattctatttggattatactttcaataaatgattccttgagcggtgcttcaaatggatagtctaaatcattcatcatttttattaatttatttatttgggttttagtcatcattttgtgtggtccataatatttttcatgggaggataaattgagccagatggaatggcccagggagtgattttgctttcacctactaatattcccttagctattcgtgattgcatgttagtaaaaactttatgatatggttcgttttcgattaatactaaattttcgaaatcattagtaccaccatcatctagagatagtttatggtgaacattataatttagaggaacattgccctttctcattcttaaaaggtcttcggcgttgaatcttccagatgcttcggaggtttttgcaagtttgataagaaaattttttcttacagttttattaaactcctttcgtaagttagctaagtcttttgaaggtctcttaatgtatattatttctattatgtctataccatcaagaagtttttgttgacctctaagtttgcctaagtaactatttatttctgtatatgtatcaacattagaacgctttgttaaaagaatagatgctgttgctatcgctatgcccgctgttttttcatttagtatttgatcatagccttttattgcatctccacccagtttttccgcagtatctctgaatccttcaatgttcccattgtatacgccaccagcagcaagtagcctgccaatagctttgctgtttaacgttttgaaacgattatttgtttggttttttgaatttggtaaaaacaaacggttataattttcagggagtgccaaatagctgaactcggtatttgcgataagatgttgacagaggataaattcataactaatagttattgtttctgtatccagttggttttcaatgatctggtgatgaatagccgataaaaaagcgcctcttagttgtatataataatacttttccaatctaccaaatctatttattcgatagaagtcaaatcccataaataattgttcattattgttaatggaattaataaataatggagtgcttttatcaattaatttacaaaatgttataccatggaactgtgaaccaagccccgtattattaatattatttaagagtgagaatgtaaatatttcatcctcatgcccgctctgccaacgattacctgtagactcagaagtcccacaacctgcggagatgcttccttgttgttctcccgttactgtcaggtaaacaatattactcatccctgaaaagtccttttatggcatgctattttatcaatggcaatattatgcttgttaattgttatttatttactccaggaaattgtaggcgtatatattaaaaaataaaatattacactttaggaagtaattatgagttaaatctcaatatatgtattgggcaaataaataccttaaaggaaggtatgtcgattttgaatgacaccctttttccatctcagaaaaagggcactatcttacttcacccgcgccatataatatgcatcgacatattcaccattacgcaatgcgtacttcttaccagtcccttcaatttcaaagccgtattttttatagaccttaattgccggggcgttatcgacaaacacggttagttcaatgcgatctacccgcaaccagttgtcgcacatttcaatcatctctcgcatcagggcgctggcgacgccgcggttcttccaacgagagtcgacacagataccaaaatcggcaacatgactgcggcgtgggcgctgttgcacgtcaatggtgagatggcccacgacgtctccatcaatacaggcgacgagttgcttgatgccgggacgatcggcgagtcgctcctgccacatatgatcggaaggatgaggcacctgtagtgtgttgcaatacacctccggctgggcgtgaatctgcctgatggcctcgtaatcccgtgtttctgcgtggcgtattactatctcactcattcctttgtcctctttggggtaaatgtccctttcaacatcattgactttcaaatgcgagtcaaatgcatttttttgcaaaaagtgttggacaagtgcgaatgagaatgattattattgtctcgcgatcaggaagaccctcgcggagaacctgaaagcacgacattgctcacattgcttccagtattacttagccagccgggtgctggctttttttttgatctttcgttctcaatttatccacgggagtgcttgtgttcgttatgcgcactccagtaggaaccacgtccgctttgcgctaaggtgtaaataaccaccttaaaaaggacgaaatcatggtcatcaactgcgcctttattggcttcggcaaaagcaccacccgttaccatctgccgtatgtacttaaccgcaaggatagctggcatgtcgcgcatatttttcgtcgccatgcgaagccggaagaacaggctcccatttattcccatatccatttcaccagcgatctcgacgaagtactaaacgatcccgatgttaagctggttgttgtctgcacccacgcggacagccatttcgagtacgcgaaacgcgcgctggaagccgggaaaaatgtgctggtcgaaaaaccgttcactccgacacttgcgcaggcgaaagagctgtttgcgttggcgaaaagcaaagggctgaccgtcacgccgtatcagaatcgtcgctttgactcctgcttcctgacagcgaaaaaagcgattgaaagtggcaagttgggagagattgttgaagtggaaagccattttgactattaccgcccggtggcagaaaccaaacctgggctgccgcaggatggcgcgttttatggccttggtgtgcatacgatggaccagattatttctctgttcggtcgcccggatcacgtcgcttatgacatccgcagcctgcgtaataaagccaatcctgacgacacctttgaagcgcaactgttttatggcgacctgaaagccatcgtcaaaaccagccatctggtgaaaatcgattatccgaaatttatcgttcacggtaagaaaggttcgtttattaaatacggtatcgaccagcaggaaaccagcctgaaggctaatattatgccgggcgaaccgggattcgcagcggatgattcggtcggtgtgctggagtatgtcaatgacgagggcgtgacggtcagagaagagatgaagccggagatgggcgattacgggcgcgtttatgatgcgttgtatcaaaccatcacccacggtgcgccaaattacgtcaaggaatctgaagttcttaccaatctggaaatccttgaacgcggatttgagcaagcctctccctccacagtaactctcgctaagtaagtttgatggcccctcgaatagttcaatttttttgaacagaggggtcaattttcaccctctatcatcccaggcagatcgggtccacactaagcccatcgaaatcattcagggggcgaatacaaatgatctacttacgcaaagcaaatgaacgtggtcatgcaaatcatggctggctggactcctggcatactttctcttttgccaactattacgatccgaactttatgggcttctccgcgctgcgcgtgattaacgacgacgtgattgaagcagggcagggcttcggcactcacccgcataaagatatggaaattttgacctacgtgctggaaggtactgttgagcatcaggacagcatgggcaataaagagcaggttccggcgggtgagttccagattatgagtgctggtacgggtattcgtcactcagagtacaacccaagcagcaccgagcgtctgcatctgtatcagatctggatcatgcctgaagaaaacggtattacgccgcgttatgaacagcgtcgcttcgatgccgtacagggcaaacagctggtgctctcgccggatgcgcgagatggttcattgaaagtgcatcaggatatggaactgtaccgctgggcgttgctgaaagatgagcagtcggtgcatcagattgccgctgaacgccgcgtctggatccaggtggtgaaaggcaatgtcaccattaacggcgtgaaagcctcgaccagcgatggtctggcaatctgggatgagcaggcaatctccatccatgcggatagcgacagcgaagtgttactgttcgatctgccgccggtttaaaactcaacggcatctttgaagcctgcctttttgcaggcttcctcgctcgctccggtcgcgtgctgatgtacgcttccggggttttgccgcgtcgttagcacaatgcgatgcaattgatttagtgtatatctaataattgtaaacaagcactgttttccccgggaaggttctgatgtgtccgtgttaaactaagagaatctatctcttttgtaccttcaggacgatgaaaaagaaaagacccgtacttcaggatgtggctgaccgtgtaggcgtgaccaaaatgacggtcagccgttttttacgcaacccggagcaggtttccgtcgctctacgcggcaagattgccgcggctcttgatgaactgggctatattcccaatcgtgcgcccgatatcctctctaacgccaccagccgggcgattggcgtcctgttaccttctctcaccaaccaggttttcgcggaagtattacgcggaatcgaaagcgtcaccgacgcgcacggttatcagaccatgctggcgcactacggttataaaccggaaatggagcaagaacgcctcgaatccatgctctcctggaatatcgacggcctgatcctcaccgaacgtacccacacgccgcgcaccttaaagatgattgaagtggcgggtattcccgtggtggaactgatggacagcaagtcgccatgccttgatatcgccgtcggttttgataactttgaagcagcacgccagatgaccactgccattattgctcgcgggcatcgccacattgcctatctcggcgcacgtctcgacgaacgtactatcatcaaacagaagggatacgaacaggcgatgctggatgcaggcctggtgccatatagcgtgatggttgagcaatcttcttcttactcttccggtattgaactgattcgccaggcgcggcgggaatatccgcagctggatggcgtgttctgtacgaatgatgacctggcggtcggcgcggcgtttgaatgtcagcgtctggggttaaaagttcctgacgatatggcgattgccggtttccacggtcatgacattggtcaggtgatggagccacgacttgcgagcgtgctgacgccgcgtgagcggatgggcagtattggcgctgaacgcctgctggcgcgtattcgtggcgaatctgtgacaccgaaaatgttagatttaggtttcaccttgtcaccgggcggatctatttaagcccacaaatttgaagtagctcacacttatacacttaaggcatggatggatattgcttctgatattgtccggctggacaatgttaccgataacagttacccgtaacatttttaattcttgtattgtgggggcaccactttgagcacgactaaccatgatcaccacatttacgtcttgatgggcgtatcgggcagcggcaaatctgcggtcgccagtgaagtggcgcatcaacttcatgccgcgtttcttgatggcgatttcctccatccacggcgcaatatcgaaaaaatggcgtctggcgaaccactgaatgacgacgatcgcaaaccgtggttgcaggcgctgaacgacgccgcgtttgctatgcagcgcactaataaagtgtcgctgatcgtctgttctgcattgaaaaaacactatcgcgacttgctgcgtgaaggtaatccgaatctctctttcatctatttgaaaggcgattttgatgtgattgaaagccgcctgaaagcgcgcaaaggccatttctttaaaacccaaatgttggtgacgcagtttgaaacgctgcaggagccgggtgcggacgaaaccgatgtactggtggtggatatcgatcaaccgctggaaggtgttgtggcaagcaccattgaggttattaaaaaaggcaaataagtagtgactacattaacgcttgttttaacagcagtagggtctgttttactgctgctgtttttagtcatgaaggcgcgtatgcacgctttcctggctttaatggtggtgtccatgggggctggccttttttctggtatgccgctcgataaaatcgcagcgacgatggaaaaagggatgggaggcaccctcggcttcctggcggtggttgtcgccctgggagctatgtttggcaagatcttacatgaaaccggcgcagtcgatcagattgccgtcaaaatgctcaaatccttcggtcacagccgcgcgcattatgccatcggccttgcggggctggtctgtgcgctaccgctgttctttgaagtggcgatagttctgctgattagcgttgctttctcaatggcgcgccacaccggtacgaacctggtgaagctggtaatcccattatttgcaggcgtggcggcagcggcggcatttctggtgcctggaccagcgccgatgctgctggcatcgcagatgaatgccgactttggctggatgatcctgattggcctgtgtgcggcaattccgggaatgattattgccgggccgctgtggggtaacttcatcagccgttacgttgagctgcatattcctgacgacatcagcgaaccgcatctcggcgaaggcaaaatgccatctttcggattcagcctgtcgctgatcctgctgccgctggtgctggtagggctgaaaaccattgccgcgcgttttgtgccggaaggatcaactgcttacgaatggtttgagtttatcggtcatccgtttaccgcgattctggttgcttgtctggtggcgatttacggtctggcaatgcgtcagggcatgccaaaagacaaagtgatggagatttgcggtcacgcgctgcaaccggcggggatcattctgctggtgattggtgcgggcggcgtgttcaaacaggtgctggttgactctggcgtaggtccggcactgggcgaagcgttaaccggcatgggcctgccgattgctatcacctgcttcgtgctggcagctgcagtgcgcatcattcagggttctgccaccgtagcctgtttaacggcggtaggactggtgatgccggttattgaacaactgaactactccggtgcgcaaatggcggcgctgtcgatttgtatcgctggtggttcgattgttgtcagccacgttaacgacgccggtttctggttgttcggtaaatttaccggcgcgaccgaagccgaaacgctgaaaacctggaccatgatggaaaccatcctcggcactgtcggtgccatcgttgggatgattgcgttccagctgttgagttaagtttgttcgcccggtagttgtgacgctaccgggttcttttcgaaaaactctcctcgttaccccttcatccacattcgaatgccgtcgaggaacatctgggttgccatcatcaccagaatcaatcccatcaggcgttcaagtgcgttcacccctttctcgcccagcagacgtaaaaatagcgaagactgtagcaggatgacaaaggtgccgccccaggccagcagcagagcaatcaccagatgccccatctgattcgggtactgatgagacaacaacatcagcgtggcgagaatagtcggcccggcgactaacggaattgccaacggcacgataaatggctcttcacctgccggaagcccgctgctatttcctgaagcgctggggaaaatcattttaatggcgatcagaaacagaatgatgccgccagaaatggagacggtttctgctcgtaggctaagaaatgccagaattttctcacccgcaaacaggaacaccagcatcaccaggagagcaataagcaactctcgcaccatgattgcccgccgtcttttcggttcagtatgtttcagtacggacatgaaaataggtaggtttccgagcggatccataatcaggatcaataaaactgctgcagaaatgatttcattcataactcaaattccctgataattgccgcggactttctgcgtgctaacaaagcaggataagtcgcattactgatggcttcgctatcattgattaatttcacttgcgactttggctgctttttgtatggtgaaagatgtgccaagaggagaccggcacatttatacagcacacatctttgcaggaaaaaaacgcttatgaaaaatgttggttttatcggctggcgcggtatggtcggctccgttctcatgcaacgcatggttgaagagcgcgacttcgacgccattcgccctgtcttcttttctacttctcagcttggccaggctgcgccgtcttttggcggaaccactggcacacttcaggatgcctttgatctggaggcgctaaaggccctcgatatcattgtgacctgtcagggcggcgattataccaacgaaatctatccaaagcttcgtgaaagcggatggcaaggttactggattgacgcagcatcgtctctgcgcatgaaagatgacgccatcatcattcttgaccccgtcaatcaggacgtcattaccgacggattaaataatggcatcaggacttttgttggcggtaactgtaccgtaagcctgatgttgatgtcgttgggtggtttattcgccaatgatcttgttgattgggtgtccgttgcaacctaccaggccgcttccggcggtggtgcgcgacatatgcgtgagttattaacccagatgggccatctgtatggccatgtggcagatgaactcgcgaccccgtcctctgctattctcgatatcgaacgcaaagtcacaaccttaacccgtagcggtgagctgccggtggataactttggcgtgccgctggcgggtagcctgattccgtggatcgacaaacagctcgataacggtcagagccgcgaagagtggaaagggcaggcggaaaccaacaagatcctcaacacatcttccgtaattccggtagatggtttatgtgtgcgtgtcggggcattgcgctgccacagccaggcattcactattaaattgaaaaaagatgtgtctattccgaccgtggaagaactgctggctgcgcacaatccgtgggcgaaagtcgttccgaacgatcgggaaatcactatgcgtgagctaaccccagctgccgttaccggcacgctgaccacgccggtaggccgcctgcgtaagctgaatatgggaccagagttcctgtcagcctttaccgtgggcgaccagctgctgtggggggccgcggagccgctgcgtcggatgcttcgtcaactggcgtaatctttattcattaaatctggggcgcgatgccgcccctgttagtgcgtaatacaggagtaagcgcagatgtttcatgatttaccgggagttaaatagagcattggctattctttaagggtggctgaatacatgagtattcacagccttacctgaagtgaggacgacgcagagaggatgcacagagtgctgcgccgttcaggtcaaaaaaatgtcacaaccagaagtcaaaaatccaattggatggggtgacacaataaaacaggaagacaagcatgtccgatcgtatcgatagagacgtgattaacgcgctaattgcaggccattttgcggatcctttttccgtactgggaatgcataaaaccaccgcgggactggaagtccgtgcccttttacccgacgctaccgatgtgtgggtgattgaaccgaaaaccgggcgcaaactcgcaaaactggagtgtctcgactcacggggattctttagcggcgtcattccgcgacgtaagaattttttccgctatcagttggctgttgtctggcatggtcagcaaaacctgattgatgatccttaccgttttggtccgctaatccaggaaatggatgcctggctattatctgaaggtactcacctgcgcccgtatgaaaccttaggcgcgcatgcagatactatggatggcgtcacaggtacgcgtttctctgtctgggctccaaacgcccgtcgggtctcggtggttgggcaattcaactactgggacggtcgccgtcacccgatgcgcctgcgtaaagagagcggcatctgggaactgtttatccctggggcgcataacggtcagctctataaatacgagatgattgatgccaatggcaacttgcgtctgaagtccgacccttatgcctttgaagcgcaaatgcgcccggaaaccgcgtctcttatttgcgggctgccggaaaaggttgtacagactgaagagcgcaaaaaagcgaatcagtttgatgcgccaatctctatttatgaagttcacctgggttcctggcgtcgccacaccgacaacaatttctggttgagctaccgcgagctggccgatcaactggtgccttatgctaaatggatgggctttacccacctcgaactactgcccattaacgagcatcccttcgatggcagttggggttatcagccaaccggcctgtatgcgccaacccgccgttttggtactcgcgacgacttccgttatttcattgatgccgcacacgcagctggtctgaacgtgattctcgactgggtgccaggccacttcccgactgatgactttgcgcttgccgaatttgatggcacgaacttgtatgaacacagcgatccgcgtgaaggctatcatcaggactggaacacgctgatctacaactatggtcgccgtgaagtcagtaacttcctcgtcggtaacgcgctttactggattgaacgttttggtattgatgcgctgcgcgtcgatgcggtggcgtcaatgatttatcgcgactacagccgtaaagagggggagtggatcccgaacgaatttggcgggcgcgagaatcttgaagcgattgaattcttgcgtaataccaaccgtattcttggtgagcaggtttccggtgcggtgacaatggctgaggagtctaccgatttccctggcgtttctcgtccgcaggatatgggcggtctgggcttctggtacaagtggaacctcggctggatgcatgacaccctggactacatgaagctcgacccggtttatcgtcagtatcatcacgataaactgaccttcgggattctctacaactacactgaaaacttcgtcctgccgttgtcgcatgatgaagtggtccacggtaaaaaatcgattctcgaccgcatgccgggcgacgcatggcagaaattcgcgaacctgcgcgcctactatggctggatgtgggcattcccgggcaagaaactactgttcatgggtaacgaatttgcccagggccgcgagtggaaccatgacgccagcctcgactggcatctgttggaaggcggcgataactggcaccacggtgtccagcgtctggtgcgcgatctgaacctcacctaccgccaccataaagcaatgcatgaactggattttgacccgtacggctttgaatggctggtggtggatgacaaagaacgctcggtgctgatctttgtgcgtcgcgataaagagggtaacgaaatcatcgttgccagtaactttacgccggtaccgcgtcatgattatcgcttcggcataaaccagccgggcaaatggcgtgaaatcctcaataccgattccatgcactatcacggcagtaatgcaggcaatggcggcacggtacacagcgatgagattgccagccacggtcgtcagcattcactaagcctgacgctaccaccgctggccactatctggctggttcgggaggcagaatgacacaactcgccattggcaaacccgctcccctcggcgcgcattacgacggtcagggcgtcaacttcacacttttctccgctcatgccgagcgggtagaactgtgtgtctttgacgccaatggccaggaacatcgctatgacttgccagggcacagtggcgacatttggcacggttatctgccggatgcgcgcccgggtttgcgttatggttatcgcgttcatggcccctggcaacccgccgaggggcatcgctttaacccggcgaagttgttgattgatccttgcgcgcggcaaattgacggggagtttaaagataacccgctgctgcacgccggtcataatgaacctgactatcgcgacaacgccgccattgcgccgaaatgcgtagtggtggttgatcactatgactgggaagatgatgccccgccgcgcacgccgtggggcagcaccatcatttatgaagcccatgtcaaaggattaacgtacttgcacccggagatcccggtcgagatccgtggcacttataaagccctcgggcatccggtgatgatcaactatttgaaacaattgggcattaccgcgctggaactgctgccagtggcgcagtttgccagtgaaccacgtctgcaacgcatggggctaagtaactactggggttacaacccggtggcgatgtttgcgctgcatccggcgtatgcctgctcgccagaaacggcgctggatgagtttcgcgatgcaatcaaagcactgcataaagcgggtatcgaagtcattcttgatatcgtgctcaaccatagtgcggaactggacctcgacggcccgttattctcgctgcgtgggatcgataaccgtagctattattggataagagaagacggcgattatcacaactggaccggttgcggcaacacgctcaatttgagtcatccggcggtggtggattatgccagcgcctgcctgcgttattgggtagaaacctgccacgtcgatggtttccgctttgatctggcggcagtcatgggccgtacgccagagttccgtcaggatgcgccgttgtttaccgctatccagaactgcccggtgctctcgcaggtgaagttaattgctgaaccgtgggatatcgctcctggtggttatcaggtgggaaatttcccgccgctgtttgccgagtggaacgatcatttccgcgatgctgcccgtcgtttctggctacattatgatttgcctctgggggcgtttgccgggcgttttgctgcctccagcgatgtttttaaacgtaatggtcgtctgccgagtgccgcgattaatctcgtcaccgcgcatgacggttttacgcttcgcgactgcgtttgcttcaaccataaacacaatgaagcaaacggagaagaaaatcgcgacgggaccaacaacaattacagtaacaatcatggtaaagaagggttaggcggttctcttgacctggttgaacggcggcgcgacagcattcacgccctgttaacaacgttgttgctctcccagggtacgccgatgttactggccggtgacgaacatggtcacagccagcatggcaataacaatgcctactgtcaggataaccaattaacctggttggactggtcgcaggcaagcagtggtttaaccgcatttaccgccgcgttaatccatctgcgcaagcgcattcccgctttggtggagaatcgctggtgggaagaaggcgacggcaatgtccgttggctaaatcgatatgctcaacctttaagcacggatgagtggcaaaacgggccgaaacagctgcaaattctgctctcggatcgctttttgatcgcaattaacgccacgcttgaggtaacagagattgttttacctgctggggagtggcacgccattcccccattcgctggagaggataacccagtgattacggctgtctggcagggacctgcacacggattgtgtgtgttccagagatgataaaaaaggagttagtcatggttagtttagagaagaacgatcacttaatgttggcgcgccagctgccattgaaatctgttgccctgatactggcgggaggacgtggtacccgcctgaaggatttaaccaataagcgagcaaaaccggccgtacacttcggcggtaagttccgcattatcgactttgcgctgtctaactgcatcaactccgggatccgtcgtatgggcgtgatcacccagtaccagtcccacactctggtgcagcacattcagcgcggctggtcattcttcaatgaagaaatgaacgagtttgtcgatctgctgccagcacagcagagaatgaaaggggaaaactggtatcgcggcaccgcagatgcggtcacccaaaacctcgacattatccgccgttataaagcggaatacgtggtgatcctggcgggcgaccatatctacaagcaagactactcgcgtatgcttatcgatcacgtcgaaaaaggcgcacgttgcaccgttgcttgtatgccagtaccgattgaagaagcctccgcatttggcgttatggcggttgatgagaacgataaaattatcgaattcgttgaaaaacctgctaacccgccgtcaatgccgaacgatccgagcaaatctctggcgagtatgggtatctacgtctttgacgccgactatctgtatgaactgctggaagaagacgatcgcgatgagaactccagccacgactttggcaaagatttgattcccaagatcaccgaagccggtctggcctatgcgcacccgttcccgctctcttgcgtacaatccgacccggatgccgagccgtactggcgcgatgtgggtacgctggaagcttactggaaagcgaacctcgatctggcctctgtggtgccggaactggatatgtacgatcgcaattggccaattcgcacctacaatgaatcattaccgccagcgaaattcgtgcaggatcgctccggtagccacgggatgacccttaactcactggtttccggcggttgtgtgatctccggttcggtggtggtgcagtccgttctgttctcgcgcgttcgcgtgaattcattctgcaacattgattccgccgtattgttaccggaagtatgggtaggtcgctcgtgccgtctgcgccgctgcgtcatcgatcgtgcttgtgttattccggaaggcatggtgattggtgaaaacgcagaggaagatgcacgtcgtttctatcgttcagaagaaggcatcgtgctggtaacgcgcgaaatgctacggaagttagggcataaacaggagcgataatgcaggttttacatgtatgttcagagatgttcccgctgcttaaaaccggcggtctggctgatgttattggggcattacccgcagcacaaatcgcagacggcgttgacgctcgcgtactgttgcctgcatttcccgatattcgccgtggcgtgaccgatgcgcaggtagtatcccgtcgtgataccttcgccggacatatcacgctgttgttcggtcattacaacggggttggcatttacctgattgacgcgccgcatctctatgatcgtccgggaagcccgtatcacgataccaacttatttgcctataccgacaacgtattgcgttttgcgctgctggggtgggttggggcagaaatggccagcgggcttgacccattctggcgtcctgatgtggtgcatgcgcacgactggcatgcaggccttgcgcctgcgtatctggcggcgcgcgggcgtccggcgaagtcggtgtttactgtgcacaacctggcctatcaaggcatgttttatgcacatcacatgaatgacatccaattgccatggtcattctttaatattcatgggctggaattcaacggacaaatctctttcctgaaggccggtctgtactatgccgatcacattacggcggtcagtccaacctacgctcgcgagatcaccgaaccgcagtttgcctacggtatggaaggtctgttgcaacagcgtcaccgtgaagggcgtctttccggcgtactgaacggcgtggacgagaaaatctggagtccagagacggacttactgttggcctcgcgttacacccgcgatacgttggaagataaagcggaaaataagcgccagttacaaatcgcaatggggcttaaggttgacgataaagtgccgctttttgcagtggtgagccgtctgaccagccagaaaggtctcgacctggtgctggaagccttaccgggtcttctggagcagggcgggcagctggcgctactcggcgcgggcgatccggtgctgcaggaaggtttccttgcggcggcagcggaataccccggtcaggtgggcgttcagattggctatcacgaagcattttcgcatcgcattatgggcggcgcggacgtcattctggtgcccagccgttttgaaccgtgcggcttaacgcaactttatggattgaagtacggtacgctgccgttagtgcggcgcaccggtgggcttgctgatacggtttctgactgttctcttgagaaccttgcagatggcgtcgccagtgggtttgtctttgaagatagtaatgcctggtcgctgttacgggctattcgacgtgcttttgtactgtggtcccgtccttcactgtggcggtttgtgcaacgtcaggctatggcaatggattttagctggcaggtcgcggcgaagtcgtaccgtgagctttactatcgcttgaaatagttttcaggaaacgcctatatgaatgctccgtttacatattcatcgcccacgcttagcgtagaagctcttaagcactctatcgcttacaagctgatgtttacgattggaaaggacccggtcgtcgccaataaacatgaatggctgaacgcaacgttatttgctgtgcgcgatcgtctcgtggagcgctggttacgttcaaaccgtgcccagttgtcgcaagaaactcgtcaggtttactacctgtcgatggagtttttgattggccgtacgctctccaacgccatgttgtcgctaggaatttacgaagatgtacagggcgcactggaagcgatggggttaaatctcgaagagctgattgatgaagaaaatgacccaggcctcggtaacggtggcctgggacgtctggcggcttgcttccttgattctctggcgacgttagggttgccggggcgcggttacggcatccgctatgactacggtatgttcaagcagaacatcgttaacggtagccagaaagagtcgccagactactggctggaatacggtaacccgtgggaattcaaacgccacaacacgcgctataaagtccgttttggcggtcgcattcagcaggaaggtaaaaaaacgcgctggattgaaaccgaagagattctgggagtcgcttacgatcagataatccctggttacgacaccgacgcgaccaacacgctgcgtttgtggagtgcgcaagccagtagcgaaattaacctcggtaaattcaaccagggtgactacttcgcggcagtggaagataaaaaccactccgagaacgtatctcgcgtactgtatccggatgactccacctactccgggcgtgagctgcgcctgcgtcaggaatacttcctggtttcctcgaccattcaggacattttaagccgccattatcagttgcataaaacctacgataacctggcggataaaatcgcgattcatctcaatgatacccatccggtactgtcgattcctgagatgatgcgtctgctgatcgatgagcaccaatttagctgggacgacgcgtttgaggtgtgttgtcaggtcttctcctacactaaccacacgctgatgagcgaggcgctggaaacctggccggttgatatgctgggtaaaattctgccgcgtcacctgcagatcatctttgaaatcaacgactatttcctgaaaaccttgcaggaacagtatccgaacgataccgatctgctgggacgggcgtcgatcattgatgaatccaacggtcgtcgtgtgcgtatggcctggctggcggttgttgtgagccacaaagttaacggtgtatcggaactgcactctaatctgatggtgcaatcgttgtttgccgactttgcgaaaatcttcccgggtcgtttcaccaacgtcaccaacggtgtgacgccgcgtcgctggctggcggtagcgaacccatcgctttcagccgtgctggacgaacacctgggccgtaactggcgcaccgaccttagcctgcttaatgagctgcaacaacactgtgatttcccaatggttaatcacgctgtgcatcaggcgaagctggagaacaaaaagcgtctggcagagtatatcgcccagcagctgaatgtggtggtgaatccaaaggcgttgttcgatgtacaaatcaaacgtattcacgaatacaaacgtcaattgatgaatgtgttgcatgtgattacccgctataaccgcatcaaggccgacccggatgcgaagtgggtaccgcgcgtgaatatttttggcggtaaggcggcttcggcctattacatggcgaagcacattattcatttgatcaatgacgtagcgaaagtgatcaacaacgatccgcagattggcgataagctgaaagtcgtgttcatcccgaactacagcgttagcctggcgcagttgatcattccggcggcagatctgtctgaacagatttcgctggcagggacggaagcttccggcaccagtaacatgaagtttgcgcttaacggtgcgctgactatcggtacgttggacggtgcgaatgtcgagatgctggatcatgtcggtgctgacaatatctttatttttggtaacacagcggaagaagtggaagaactgcgtcgtcagggctacaaaccgcgtgaatactacgagaaagatgaggagctgcatcaggtgctgacgcaaatcggcagcggtgtattcagtccggaagatccgggtcgctatcgcgatctggttgattcgctgatcaacttcggcgatcactaccaggtactggcggattatcgcagctatgtcgattgtcaggataaagtcgatgaactctacgagcttcaggaagagtggaccgcaaaagcgatgctgaacattgccaatatgggctacttctcttctgaccgtactatcaaagagtacgccgatcatatctggcatatcgatccggtgagattgtaagttcaccaataaatagaacggggccaaagggtcccgtttttttccgccatcatttcggaaaagtgtccagaaggggcaaggggactcggggagtataatttcaccattcaaaaagaatggaaagaataatgcaaaacagaaaatggattttgacctcgctggtaatgacttttttcggcatccccatactggcgcaatttttggcggtggttattgccatgctgggtgtcggacttgccggtattattgaagtttgtaatatccttatcacgccaacaatttaccttctgctcaaaatttttatgctggcgctgggcgcattaatgctatttttctcggggcgagtggggaacgtgcctgagttttgttacgttgggtatgatggcgtgggctttgcggtaattccctgaattaaaaagtaggttagatttttgacaaagtgcgctttgttcatgccggatgcgacgtgaacgtcttatctggcctacaagaccatgcaaattcaatatattgcataaaccacgtaggcctgataagcgtagcgcatcaggcagttttgtgtttgtcatcagtctcaggccagattgaaatctgacctgatcaccttacgttaatttacgacgccagcgataacctctgctgcgtatactccaccagccactgactcacacgagattgttgatccgcatttagccacatgccttgttttgtgcgacgccacagggcgtcgtcggcgcggcggacccattcgtgatccaccaggtatttcagctccgcttcgtagaactcatgaccgaaatcttccccgagatcgcttaccgttcccgcattgccgagcagcagctcgctgttgctgccgtaagtgcgagcgtaatgacgcgccagcgattcagtcaggaacggatagcggcggcgcaggcgagcggcataatcgtcgcggtcgccttcaatggcgccacccggtagcacactctctttcgtccatgccgggccaataccctgataatacggcgttagtttttccagcgcatgttccgccagttttcggtaggtggtcagcttaccgccgaataccgacagcagcggtgctttgccattttcatcatgaatatcaagggtgtaatcacgggtaatagcctgcggcgagtcggactcatcatcacacagcggacgcacaccggagtaggtccagacgatatcgtcacggcttaactgctttttaaagtgcgtgttatacacattcagcaggtaattgatttcactctcttcaatcttcaccgctttcggatcgcctttgtactcgacatcggtagtgccgatgatggaaaactcgtccatccacgggatcacgaacacaatacgtttatcttcgttttgcagaatgtaggcttgcttctgggtatgcacgcgcggcaccacaatatggctgcctttgatcaggcgaatgccataaggcgaaggcagatgcatcccgtcgtcgaagaactgtttcacccacgggccggtggcgttaaccaagccgcgcgcttgccagctatattttttgccggtatcgatatcttccgcttccacaatccacaggccgttttcgcggcgagcagaggtggcgcgagtccgagtaagcacttcgccgcctttacgcaccaccatctgggcgttggcgagtaccagacgggcgtcgtctacccaacagtcagaatattcgaatccgcgcttaatttccggttttaacactgaatttgcgccaaaacgcaaaccagttgatcccggcaagctggtgcgtttacccagatgatcgtacataaacagaccaatgcgaatcatccacgccgggcgcagatgcggacgatgtggcaggcgaaaacgcatcgggaaggcgatatgcggggccattttcagcagcacttcacgttcagccagcgcctcgctgaccaggcggaattcatagtgctcaaggtagcgcaggccaccgtgaatgagttttgaactggcggaagaggtcgcgcaagcgagatcctgcgcctccagcatcagcacggataaaccgcgtccagcggcgtctgccgcgataccagcaccattgatgccgccccctatcacaatcagatctttggtttccatgctgccctcattcactttcgttaaagctcataaatgttcgttatcgaacatattagcaaagaatcgcgctttaggtaacattgaaaaaacattttagagtgatatgtataacattatggcgtttatctgccgcttcgacgtaaactgtgcggtaaatttgcccacttgtttgtaaagaaagagagacgcatggatcagttcgaatgtattaacgttgccgacgcgcaccagaagttgcaggaaaaagaggcggtgctggtcgatattcgcgatccacagagtttcgcaatgggacatgcggtgcaggctttccatttaaccaacgacacgctgggcgcttttatgcgtgataacgactttgacactccggtgatggtgatgtgttatcacggcaatagcagcaaaggcgcggcgcagtatctgctgcaacagggctacgatgtggtctatagcattgacggcggctttgaagcctggcaacgtcagtttcccgcagaggtggcgtacggcgcgtaacgctttatactgtccccttttgtgtggaataagcgacagcaacgatgttgatgattacctcttttgctaacccccgcgtggcgcaggcgtttgttgattacatggcgacgcagggtgttatcctcacgattcaacaacataaccaaagcgatgtctggctggcggatgagtcccaggccgagcgcgtacgggcggagctggcgcgttttctcgaaaacccggcagatccgcgttatctggcggcgagctggcaggcaggccataccggcagtggcctgcattatcgccgttatcctttctttgccgccttgcgtgaacgcgcaggtccggtaacctgggtgatgatgatcgcctgcgtggtggtgtttattgccatgcaaattctcggcgatcaggaagtgatgttatggctggcctggccattcgatccaacactgaaatttgagttctggcgttacttcacccacgcgttaatgcacttctcgctgatgcatatcctctttaacctgctctggtggtggtatctcggcggtgcggtggaaaaacgcctcggtagcggtaagctaattgtcattacgcttatcagcgccctgttaagcggctatgtgcagcaaaaattcagcgggccgtggtttggcgggctttctggcgtggtgtatgcgctgatgggctacgtctggctacgtggcgaacgcgatccgcaaagtggcatttacctgcaacgtgggttaattatctttgcgctgatctggattgtcgccggatggtttgatttgtttgggatgtcgatggcgaacggagcacacatcgccgggttagccgtgggtttagcgatggcttttgttgattcgctcaatgcgcgaaaacgaaaataattccagggatttataaatgaaacaaacacaacgtcacaacggtattatcgaactggttaaacagcagggttatgtcagtaccgaagagctggtagagcatttctccgtcagcccgcagactattcgccgcgacctcaatgagctggcggagcaaaacctgatcctgcgccatcatggcggtgcggcgctgccttccagttcggttaacacgccgtggcacgatcgcaaggccacccagaccgaagaaaaagagcgcatcgcccgcaaagtggcggagcaaatccccaatggctcgacgctgtttatcgatatcggcaccacgccggaagcggtagcgcacgcactgctcaatcacagcaatttgcgcattgtcaccaacaatctcaacgttgctaacacgttgatggtaaaagaagattttcgcatcattctcgccggtggcgaattacgcagccgcgatggcgggatcattggcgaagcgacgctcgattttatctcccagttccgccttgatttcggcattctggggataagcggcatcgatagcgacggctcgctgctggagttcgattaccacgaagttcgcaccaaacgcgccattattgagaactcgcgccacgttatgctggttgtcgatcactcgaaatttggccgtaacgcgatggtcaatatgggcagcatcagcatggtagatgccgtctacaccgacgccccgccgccagtaagcgtgatgcaggtgctgacggaccaccatattcaactggagctgtgctgatcctgcacggcttcccacgtcagaccaaaacgcgccaggtatttgcgtagccgatccgcgtcattgacgctggctttgccctggcgcgaaacgtcaaaaagctggcgtccggctgcggaaagcgactttgcctggcggcagatagcgataacgtgttccagttgcatacggtcgaagagatcgatgttttctgcctctgcgcccagcaacgccgtaagcgcggaggggcggctctcctgccagttatagcgcagacggtttatctcatcttcaaccacgtccagagtgatgcgtccgctagtggcaaaggtggccatccgcgtgacgctggcagaaagttcgcgaaagttaccgcgccatgttgcctggggagaggtcgcaaaagccaaccaggcgcgccgcgcttcggtgttaaaacgcacgctgtcgccagtgagtgaggcgtggcgctccacttcataatccaggttcggttcaatatcttcctggcgctggcgtagacccggcagggtgaaggtccagagattgatccgcgcgtacagatcttcgcgaaatttgccttcggcaaccagctggcgcaaatcgcgcaccgttccggcgataagctgaaaatcactgctcacctggcgatcgctgccaaacgggtaaaaggttttctcttcaatggctttcagcagcattgcctgttcgtctgcgcccagttcgccaatctcatcaagaaacaacattccgccgttggcgctgcgtaataaaccttcacgagattcccgcgccccggtaaacgcgccttttacatgaccaaacagcgtcgacatggcggtatcgccgcgcagggtggcgcagttcacttccacaaacgcgccgctaaactgatgccgcgcctgttttaactctaagatgcgtcgcgccagaaatgacttgcccgcgccggttggaccgttaagcagaatcggcgcgcgggatttgatcgccactttttcgatctgctcaatcatgcggttgaagtgggggttacgcgtggcaatgccggacttaagaaaatcaagcgtttgctggcgttcctcggcaaagcggctggcgatggcgttataacggcttaaatcgagatcgataatcgttacttcacctgggccgcgcggctgttcttttttgcgcggaggtgaagattgtatcagccgggcgggcaggtaacgcgcttctgccagcagaaaccagcaaatctgcgcgacgtgggtaccggtggtgatgtgaattaaatagtcttctttttctggctgaaactcgtaaccacgggcgaaatcatgcaggcaggcgtagacctcttcgaaatcccacgggttatgcagttcaatctcaacgctcaccacttctgtttctggcgaaacgctggcgatatcgcgtttaagcgtttcaaatagcgagcgcgagcgggcgtcgtgcaacaattccagtcgatcgatgaccaacgattcttgctggcataaacagagtgtcggacgccattttgaccagcgctgactgccgcgcccggcataatccagtacggtaccgacaaagccaaaagccactgttttacgcatcttagatatccttataaaagacgatatttcattatcggtaaattggctttgcgggaaatctccggttacggacgtaaagatataatcttttttaaaacaatgaattaaaaaattaagctgcttatttaattttctggcacgacggttgcaattatcaggacagcaaacaacgaaaagagaaaaacaaaatgaattacgaattactgaccactgaaaatgccccggtaaaaatgtggaccaaaggcgtgccggtagaggccgatgcgcgtcagcaacttattaatacggcgaagatgccgtttattttcaaacatattgcggtaatgcctgatgtacacctgggtaaaggttccaccattggtagcgtgatcccgaccaaaggggcgattattccggcggcggtgggcgtggatattggctgtggaatgaacgcgctgcgtaccgcgttaacggcggaagacctgcctgaaaacctggcagagctgcgtcaggcgattgaaacggccgtgccgcacgggcgtaccactggccgttgtaaacgtgataaaggtgcctgggaaaatccacctgttaacgtcgatgctaaatgggctgagcttgaagccggttatcagtggttaacgcaaaaatatccccgtttcctgaataccaataactataaacacctgggaacgctgggaaccggtaaccactttattgaaatctgccttgatgagtcggaccaggtgtggattatgctgcactccggttcacgcggaattggtaacgccatcgggacttactttatcgatctggcacaaaaagagatgcaggaaacgcttgagacgttgccgtcgcgtgatctggcgtactttatggaaggtacggaatactttgatgattacctgaaagccgtggcctgggcgcagctttttgccagccttaaccgcgatgcgatgatggaaaacgtggtaacggcattgcagagcattacgcagaaaacggtcagacagccacaaacgctggcgatggaagagatcaactgtcaccacaactatgtgcaaaaagaacagcactttggtgaagagatctacgtgacgcgtaaaggcgcggtgtctgcgcgtgctggtcaatatggaattattcccggttcgatgggagcaaaaagctttatcgtccgtgggctgggaaatgaagagtcgttctgttcgtgcagccacggtgccgggcgggtaatgagccgaactaaagcgaaaaaactgttcagcgtggaagatcaaattcgtgccaccgcgcatgtggaatgccgtaaagatgccgaagtgatcgacgaaatcccgatggcgtataaagatattgatgcggtgatggcggcacaaagcgatctggtggaagttatctataccctgcgtcaggtggtgtgcgtaaaaggataaatgatgaaaaggatgattgcgctggatggcgcacagggcgaaggtggcgggcagatcctgcgctcggcgctgagcctgtcgatgataaccggccagccatttaccatcaccagcattcgtgccgggcgggcgaaaccggggctgttgcgccagcatctgaccgcggtaaaggcggcgacggaaatttgcggagcaaccgtggaaggcgcggagctggggtcgcagcgtctgctcttccggcccggcaccgtgcgcggcggcgattaccgctttgctatcggtagcgccggaagttgtacgctggtgctgcaaacggtgctgcccgcgctgtggtttgccgatggaccttcgcgtgttgaagtgagcggcggcaccgataacccgtcggcgccgcctgcggattttatccgccgggtgctggagccgctgctggcgaaaataggaattcatcagcaaaccacgctgttacgccacggtttttaccctgccggaggcggtgtggtggcaacggaagtctcgcccgtggcatcgtttaacaccttgcaacttggcgagcgcgggaacattgtgcagatgcgtggagaagttctattagctggtgtgccgcgccatgttgctgagcgtgaaatcgctacactggcggggagtttttccctgcatgaacagaatattcataacctgccgcgcgaccaggggccgggtaataccgtctcgcttgaagtcgaaagtgaaaatatcaccgaacgcttttttgtcgtcggtgaaaagcgcgtcagtgccgaggtggttgcggcacagttggtgaaagaggtgaaacgctacctggcaagcacggcggcggtgggggaatatcttgctgaccaactggtgctaccgatggcgctggcgggcgcgggggaatttacggtcgcccatccctcatgccatctgctgaccaatatcgcggtggtggagcgtttcttgccggtgcggtttagtttgatagaaacagatggcgtaacgcgggtgagcattgaatgatgcagagatgtaagccggatctggcgcgttatccggctaaacttacacgccgtaccccatcatcttcagcaattgctgggcgtgttgtaccgcatcctggcgatgggccacgccgagtttctgatacagattgcggatatgcgttttgatggtggttgccgcgacttccagttctccggcaatttgctcattgctgtaaccagagtagatcagccccagtacctgccattcacgttgcgtcagcgggctggtgcggatcagttcaggtacttcaggatgatttagcagacgttcaacgaaattctcatcgaaatgggcgaatttatgccgatgatgttgattgatttctcgcagaatacgctgcgcgcgatgctgttccagttccggcagcgtattaagctgaatcagctgacgcagttgttgcgccatcgcttcgccttcgatgacaaaatggctgataaatccggtgcgattcgccagttttaatgcgtccagcaacacgcgctgggcgtcacttttacgtccggcctgccagtacagttgattaagcagcaacaggttacggttgagatcgctcatcaaccgcagactccgggcattttcattgagttcttcgagaacaatttctgccggttcaaactcgcccagcaagatttgtgcacgggcaatgttgcgccattgaccttgcaggaagtggttgttcgcaaactctggtttagccgtatgacgcaaccagttggcagcggcggctttatcgccggtcatttgccagtaaatcacccggactttgttggcgttagagatccagtcgctgtgatatttgccattccccagcaggttttccagacggttcagctggctacgggcgttatctaaatcaccacgggccagcgagcattgaatcaacattgccaggcactgaagctgttgctgtggctgataagacgacaagacttcaatcccgctacgcgccgacgcttcggcttcatccagccgcgcccaggcccataacagctgcgcacgaatgcgcaccagaaactcatgcattggcagctgttccagatgctgctcgttgatcagctggaatgctttttcctgcgtttcccacgcggtttgcaggaacccttgggcaaacagaatttcactttgctggattaaactccacaaagcgtagtgccagacatcgtgctggcgtgccatctgttcggtttgctgcattagcgccagtgagcgggtcaattcgcctttgcagtgcagcacttcacccagcaccgaggttgccacaatgcggctatagaaccagcccggcggcagctcttccagtgccagttttgccagccgttccgcttcatccggattaccatcgttaatcgccacctgggcgcgcagagcgttaaattctgcgtgcatggtgtcttctctgatgtccttgatttcatgttcagcacgggctagcagggtgttaacttcgccgtagcgatgttggctttgcatcagccacgcctgcaataacaccaactgcggattttccagcaagctgtcccacggcagggccttaagcgactcttccagcagcgacagttcgctatggttgaacagactccaggcgtgattaagcagaatatcgcgcagcatcagcgcatcgcctgccgccagcgcatgatgaattgcttcgctgggaaatccctgggccatccagctttctgcggcggcacggtggatttccggcagctccgccgccagttcccactggcagcgctggcgcaggaagttaccaaacagcgggtgatagcagaaccactcgccggtatcatccatccgctgtaaaaacagcccctgacgctcaatctcttcgaggcgcatttgcccgttttcttcgccggtcacacgggtgatgagggcatcgttcattgagcgcaaaatggcgcttttcaacagaaaatggcgcgttgcgagatcgacgttatccaaaacctcatcgaccagataatccgaaagatggctggcattgattcccgccaggcggcgtgccgacttatgggctgagtgggtattctgccgggcggagagggcgattagctgtagtgccgtcgcccaaccggaaacgtcatcgcaaatccgactgctttctgcggcttcaatcggcgatgacagacggcaatcaaaaaactgcttcgcttcctgatgggtaaatgccagttgctgactgccaatttccagcagttgatcacgaacacgcagattggcaatgcccagttgcggaaggttgcgtgacaacaccaccagggtgagattttctggttgatggcgaataaagaagcgcattgactcgtggatcactggattagtgatcagatgatagtcatcgatgaccagataaagtgggctatgccattccgccagctcaatgaaaagctgggcgaagagtgacgtcaggctggcatattgccgtttttgcgccatcgtctcacatatcgcacagtgaccgttggttgcctgctgcacggcggcaatgagatagctggcgaaacgctcttgctggttatcaccttcatccagcgagtaccagccgatatcgtttttgcctgccgcccactgggaaatgagggtggtctttccgtagcccgcaggactcgtgatcagcgccagccggaagttgttcgcgccggaaagtttagccagcaggcgctcacgaaccacggtatggtcgagtcgaaccggacgacttagttttgacggaatcagcatagttaatcacttcactgtggaaaatgaggaaatattattttttttgcgcttcgtaattaatggttataaggtcggccagaaacctttctaatgcaagcgatgacgtttttttatgtgtctgaatttgcactgtgtcacaattccaaatctttattaacaactcacctaaaacgacgctgatccagcgtgaatactggtttcccttatgttcatcagattcatttaagcaagggtttcttcttcattcctgatgaaagtgccatctaaaaagatgatcttaataaatctattaagaatgagatggagcacactggatattttacttatgaaactgtttcactcctttacttaatttatagagttaccttccgctttttgaaaatacgcaacggccattttttgcacttagatacagattttctgcgctgtattgcattgatttgatgctaatcctgtggtttgcactagctttaagtggttgagatcacatttccttgctcatccccgcaactcctccctgcctaatcccccgcaggatgaggaaggtcaacatcgagcctggcaaactagcgataacgttgtgttgaaaatctaagaaaagtggaactcctatgtcacaacctatttttaacgataagcaatttcaggaagcgctttcacgtcagtggcagcgttatggcttaaattctgcggctgaaatgactcctcgccagtggtggctagcagtgagtgaagcactggccgaaatgctgcgtgctcagccattcgccaagccggtggcgaatcagcgacatgttaactacatctcaatggagtttttgattggtcgcctgacgggcaacaacctgttgaatctcggctggtatcaggatgtacaggattcgttgaaggcttatgacatcaatctgacggacctgctggaagaagagatcgacccggcgctgggtaacggtggtctgggacgtctggcggcgtgcttcctcgactcaatggcaactgtcggtcagtctgcgacgggttacggtctgaactatcaatatggtttgttccgccagtcttttgtcgatggcaaacaggttgaagcgccggatgactggcatcgcagtaactacccgtggttccgccacaacgaagcactggatgtgcaggtagggattggcggtaaagtgacgaaagacggacgctgggagccggagtttaccattaccggtcaagcgtgggatctccccgttgtcggctatcgtaatggcgtggcgcagccgctgcgtctgtggcaggcgacgcacgcgcatccgtttgatctgactaaatttaacgacggtgatttcttgcgtgccgaacagcagggcatcaatgcggaaaaactgaccaaagttctctatccaaacgacaaccatactgccggtaaaaagctgcgcctgatgcagcaatacttccagtgtgcctgttcggtagcggatattttgcgtcgccatcatctggcggggcgtaaactgcacgaactggcggattacgaagttattcagctgaacgatacccacccaactatcgcgattccagaactgctgcgcgtgctgatcgatgagcaccagatgagctgggatgacgcctgggccattaccagcaaaactttcgcttacaccaaccataccctgatgccagaagcgctggaacgctgggatgtgaaactggtgaaaggcttactgccgcgccacatgcagattattaacgaaattaatactcgctttaaaacgctggtagagaaaacctggccgggcgatgaaaaagtgtgggccaaactggcggtggtgcacgacaaacaagtgcatatggcgaacctgtgtgtggttggcggtttcgcggtgaacggtgttgcggcgctgcactcggatctggtggtgaaagatctgttcccggaatatcaccagctatggccgaacaaattccataacgtcaccaacggtattaccccacgtcgctggatcaaacagtgcaacccggcactggcggctctgttggataaatcactgcaaaaagagtgggctaacgatctcgatcagctgatcaatctggaaaaattcgctgatgatgcgaaattccgtcagcaatatcgcgagatcaagcaggcgaataaagtccgtctggcggagtttgtgaaagttcgtaccggtattgagatcaatccacaggcgattttcgatattcagatcaaacgtttgcatgagtacaaacgccagcacctgaatctgctgcatattctggcgttgtacaaagaaattcgtgaaaacccgcaggctgatcgcgtaccgcgcgtcttcctcttcggcgcgaaagcggcaccgggctactacctggcgaagaatattatctttgcgatcaacaaagtggctgacgtgatcaacaacgatccgctggttggcgataagttgaaggtggtgttcctgccggattattgcgtttcggcggcggaaaaactgatcccggcggcggatatctccgaacaaatttcgactgcaggtaaagaagcttccggtaccggcaatatgaaactggcgctcaatggtgcgcttactgtcggtacgctggatggggcgaacgttgaaatcgccgagaaagtcggtgaagaaaatatctttatttttggtcataccgtggaacaagtgaaggcaattctggccaaaggctacgacccggtgaaatggcggaagaaagataaggtgctggacgcagtattgaaagagctggaaagcggtaaatacagcgacggcgataagcatgccttcgaccagatgctgcacagtatcggcaaacagggcggcgatccgtatctggtgatggcggatttcgcagcctatgtagaggcacaaaagcaggtggatgtgctgtaccgcgaccaggaggcctggactcgcgcggcgatcctcaataccgcccgctgcggtatgtttagctcggatcgctctattcgcgattatcaggctcgtatctggcaggcaaaacgctaaggaagctcgatggaaagcaaacgtctggataatgccgcgctggcggcggggattagccccaattacatcaatgcccacggtaaaccgcagtcgattagcgccgaaaccaaacggcgtttgcttgacgcgatgcatcaacgtaccgccacgaaagtggcggtaacgccagtcccgaatgtcatggtttataccagcggcaaaaaaatgccgatggtggtggagggcagcggcgaatatagctggctgctgaccaccgaagaaggaacgcagtacaaaggccatgtaacggggggcaaagcgttcaatctaccgacgaagctgccggaaggttatcacacgctgacactcacccaggacgaccagcgcgcgcattgccgggtgattgtcgccccgaaacgctgttacgaaccgcaggcgttgctgaataaacaaaagctgtggggtgcctgcgttcagctttatacgctgcgatcggaaaaaaactggggtattggggattttggcgatctcaaagcgatgctggtggatgtggcaaaacgtggcgggtcgttcattggcctgaacccgattcatgcgctctatccggcaaatccggagagcgccagcccatacagcccgtcttctcgccgttggctgaatgtgatttatatcgacgttaacgccgttgaagatttccatcttagcgaagaggctcaggcctggtggcagttgccgaccacgcaacagacgctgcaacaggcgcgcgatgccgactgggtcgattactccacggttaccgccctaaaaatgacagcattacgaatggcgtggaaaggtttcgcgcaacgtgatgatgagcagatggccgcgtttcgccagtttgttgcagagcagggcgacagcctgttctggcaggcagcctttgatgcgctacatgcccagcaagtgaaagaggacgaaatgcgctggggctggcctgcatggccagagatgtatcagaacgtggattcaccagaagtgcgtcagttctgcgaagaacatcgtgatgacgtcgatttttatctctggttgcagtggctggcttacagccagtttgccgcctgctgggagataagccagggctatgaaatgccgattggcttgtatcgtgatctggcggttggcgtagcggaaggtggggcggaaacctggtgtgaccgtgaactatattgcctgaaagcatcggttggcgcgccgccggatatcctcggcccgttggggcagaactggggattaccgccaatggacccgcatatcatcaccgcgcgtgcctatgaaccgtttatcgagctgttgcgtgccaatatgcaaaactgcggcgcattacgaattgaccatgtgatgtcgatgctgcgtttgtggtggataccgtatggcgagacggcagatcagggcgcgtatgttcactatccggtggatgatctgctctcgattctggcactcgaaagtaaacgtcatcgctgtatggtgattggtgaagatctcggtaccgtaccggtagagattgtcggtaagctgcgcagcagcggtgtgtactcttacaaagtgctctatttcgaaaacgaccacgagaagacgttccgtgcaccgaaagcgtatccggagcagtcgatggcggttgcggcgacacatgacctgccaacgctgcgcggttactgggagtgcggggatctaacgctgggcaaaaccctggggctgtatccggatgaagtggtactgcgcggtctgtatcaggatcgcgaactggcgaagcaagggctgctggatgcactgcataaatatggttgtctgccgaaacgtgccgggcataaggcatcgttgatgtcgatgacgccgacgctgaaccgtggtttgcagcgctacattgccgacagtaacagtgctctgttaggactacagccggaagactggctggatatggccgaaccggtgaatattcctggcaccagttaccagtataaaaactggcgacgcaagctttccgcaacgcttgagtcgatgtttgccgatgatggcgtgaacaagttgctgaaggatttggacagacggcgcagagctgcagcgaagaagaagtagagtgcggttgatgccggatgcgatgcttgacgcgtcttatccggcctactaattcatcccgaatcgtaggccggataaggcggtcacgccgcatccggcagtcagtgttatcaaatcaccatattcagcagcagacagcctaccagaccgcacaccgagataatggtttccagcatcgaccaggatttgatggtctcgccgatagtcaggttaaagtactctttgaacagccagaagcccggatcgttcacatgagagaaaatcacactaccggaaccaaccgcaataaccatcagctccgggctaacacccgtcgttgcaatcagcggtgccgcgataccacccgcagtgattgccgcaacggttgcggaacccagcgcgatacgcagtacggcagcaatcgaccaggccatcagcagcggagaaatgttggtttcgtgcatcatggaagcaatgtatttgtccacgccgctgtctaccagcacctgcttgaacgcaccgccaccaccgatgatcaacagcatcatcgcaatgattttgatggaagaaaccagcgtgtcgttaatctgatccattgaacgaccacggtttagaccaaaggtgaacatcgcaatcagcacggcaatcagcgttgccattaccgggtcaccgaggaactccgctaccggcaggaaagcgtgacctttcggcaggatcatttcggcaatcgcacgcatcgccatcagtactaccggcaccagagaggtccagacgctgacgccaaagctcggcatctcttcttcgctgaaggttttcgcgctgtagagaccttccggaattggcttatcgatacctttcaacacgcgagcgtaaaccggaccggcgagaatcacggtcgggattgccagaatagtaccgtacagcagggttttacccatatcggcattgaaaatggtggcaatcgcagtcggacccggatgcggtggcaggaagccgtgggtcacagacagtgcagccgccattggtacaccaacatacagcagtggaatattcgcagaagccgcgatggtaaacaccagcggcagcatcagcacaaagcccacttcatagaacagggcaaaaccaacggtaaaaccggtcagtaccaccgcccactggatgtgttttttaccaaatttggcaatcagcgtggtggcgatacgttgtgcgccaccgcagtctgccagcattttgcccagcattgcgccaaaacccatgatcagggcaaggctaccgagcgtcccgccgacaccggctttgatggagccaataactttatccagcggcattccttgcattaatccaacagcaagcgccacgaggacgagagcgatgaagccgttcattttgaagcggatcatcaggagcaacaacaagattacaccgatagcaacaatgactaatggcatgatttacctggcctttcatttgttatgggtaacgtcaattttctgacgacaaactctaattatcccaatcgggaacagagatattgcggcaccacgactgatacccactaaaactaattattgtagtcagatgtcaggagtatgtttggtacccatgtgaatgatacgggtaacatctggcgtttgagaatcaccagagcggggtaaatttaaattatgagaggttggtcatattatcgcggggaaacgaaccgaggatttgacaaagcaatgctgcgccaacgtctggcacatgttcaacgtaggcccgaaatgacgctttagcgtcgcatcgggcaatctacaaaagaggggataacttagtagtaggagtgttcgccgcgctggtgttcggtgagatcgcgcacacctttcagctccgggaattcgttcagcagctgcttctcgatcccttctttcagcgtcacatcgaccatggaacaaccgttacagccgccgccaaattgcagaatggcgtaaccgtcttcggtgatttccatcagcgaaacgcgaccaccgtgaccagcaagctgtgggttgatctgcgactgcagcatatactccacgcgctccatcagcggtgcatcgtctgccactttacgcattttggcgttcggggctttcagcgttaactgggaacccaactggtcggtaacaaaatcgatctctgcatcttccaggtatggtgcgcttaactcatcaacatacgcggtcagcaggtcaaatttcagggctgtgtcggtggcttccacagcgtccggcggacaataagaaacgccacattcagcgttaggcgtgccagggttaatcacaaatacgcggatttgtgtcccttcttcctgatttgccagcagtttggcaaagtgcgcttgtgcagcatcggaaatacggatcatagtaatggcctaatagttgactattttagttggttataatacgcccatcatcgaggctctacaaggttcgacaaaggcaccagacctggacagccgccgcaccattgcgtaaaagcaactgcgcaatctctgcgacggtacttccggtggtaacgacatcatccacaatcaccatatggcgaccttgcacgggcaattcaagacgaaaggcatttttcaggttgcgcttgcgcagccgggcactgagaaaatgctgggtcgcagtggcccgtgtacgtgtgacggcttcgctatcccattggcagtgcaaccagcgtgataacggctgacacagcaaatcgctctgattaaatccccgacgccagtgacgccgctgccataacggaacgctgacgatgcgatccggcaattgcaacccggtggtgcgacgagcgtgtaagacttccaatagtaacagacgtgacagggcgctggcgatttcactgcgccgggaaaatttaagctggtggataagcggacttaacggcggcgcatagtcggcaaccgtgaccagtctttgccagggcggcggtttttgcaggcagcgaccgcagggaagatgggagtgtgtggcgggtaatccacattgtgggcataacgttttatctgtgcgggtggcgcgtgaacagaccgaacaaatcccccaatgacctaacgccagtggcattcggcatagccagcataatcccggtactgttagcatatgttcatccttgtaagtcaaaagagaacaatagcggatgaataacatctggtggcagaccaaaggtcaggggaatgttcatcttgtgctgctgcacggatggggactgaatgccgaagtgtggcgttgcattgacgaggaacttagctcgcattttacgctgcaccttgttgacctgcccggcttcgggcgtagccggggatttggtgcgctgtcacttgctgatatggccgaagccgtgctgcaacaggcacctgataaagccatttggttaggctggagtctgggcgggctggtggcaagccagattgcgttaacccatcccgagcgtgttcaggcgctggtcaccgtggcgtcgtcaccttgttttagtgctcgtgacgagtggccggggataaaaccggacgtgctggcgggatttcagcagcaactcagtgatgattttcagcgtacagtggagcggttcctggcgttacaaaccatggggactgaaacggcgcgccaggatgcgcgggcgttgaagaaaaccgttctggcgttaccgatgccggaggttgacgtgcttaatggcgggctggaaatcctgaaaacggtcgatctccgtcagccgctgcaaaacgtgtccatgccgtttttgcgattgtatggctatctcgacggtctggtgccgcgcaaagtggtgccgatgctggataaactttggcctcacagcgaatcatatatcttcgccaaagcggcccatgcgccatttatttcgcatccggccgagttttgtcacctgctggtggcgttgaagcagagggtgtaggtggcttttgaaatggcgagacagaactttactgactcgccgcagccaactcttcttctgacagcccggtaaagcgcatgatgtctgcaagaggaactccggattcaagcattattttggctatatgcagggctttggattgttccccctcctgccgcaatctttccgcaatagtcattaaactctccttgtgtttcggtgaacgttcggcaacgccgtcgataaaatcgttaaaacgtacagcgtcgccagtttgcagtatgtaattaaacagccctttgatttgtctgtcattagcgtatccactacttaataagcaggccatttgctctaccagccccatcaggtcgcgttgacgaatatgtttttgaattaactccagcagcgccatacgtcggtgctgcatgatttcatcatcaggcatgacggtgacatcaatcagcggaaatgcggaggcataaagctgccttgccagtttgggatcggcgaaacaatccagccaacacagcgaatagggataggggctttcaataccgtggtaaaacaacaatggcaccaccatcggcaacgttttgtatccagcatcaaggtgattttgcattgcggcaatagcgtaacgcatcatgcgaaatgcgatcagtttgtttgaggtgctttgatgttcaatcagacaatagatgtatcctggtccttgttccgttttcaccgaccacagcacatcggaatagctttcacgcagatcgtcatcaataaagctgctcgactccagcttgagggttttcatatcacaaagcgcgtgaatgggtgccggtaaatgaaacgcaagaaaatcacgagccgtgtccggttggcgtaaaaagagtttgaacagcgcatcgtgtggggtggaactctgctttttgctcatggcgttccttcacctgttgtttgaatgccgcgactctacgcgccactccacacctgtgtattagcgagttttcatccctgcgagatgctttcaaaggaacttacgccgtgctgcaagagttgcatttttatggaaagccgcacgcaaaaaagcccggatgcagacgcataccgggctttccaaaacaggcgatggagtaaggttaacgcagcgcccaccactcgcgcagacaggcttttccttccgggcagcttttacaactgccagagaggcagccgtcaggttcttcctgaatccgcacggctttgcccatactttccagttgttgcagcatggcgttaatcattggctgtggagtgttcaatgtctggcttatctgggccgcttccatacggccccgtaacgccagcaaatcgcgcacctgaataagtgaagccattaatggcaatcaccggtggtgctggctgcgcagcaactgcttaccgacttgcgggttgccagcagttcgatatccacccggctacgcgcgcggcgcagcagaccgataaccacgatgttaaacaggataaccgccagaatgcacaccaggctgtaagttggatgctgactgtagctggcgacctgatagaacaatgttgccagtgagtaagcgatattcagcccccacaggatggagaagcccatccagccacggcttgattcacgggcgatagcccccatcaccgagatacatggtacatacagcaggacgaaaatcaggtagctgtaagctgctgctgcgctaccgaatttctgatccatcacgcccatcgccccggtacccatttcgccgtcgcctttgctggcttcaatggggttcatcagtacgctaaggctgaaggtgtctttcaggctctgccaggtttcatctatcgcactgaacagctcttcaccgaggttaaattctgccggattgaactcttcgtcctgaatattttctgcggtgtagagggtgttgagcgtacccactaccacttctttcgccatggcacctgtaaacaggccaaccgttgcctgccagttatcttcatgcacgccaattggcttgaagaccggggtgatcacccggctgacggacgccagcgccgagtcgttgatgttatcgacgattttcccgctcagcgagaagctgttgaaagcgctcaggaaaatgctgacgatgatgatcactttaccagcacgcagaacgaagcctttcagacgctgccaggtctggataatcaggcttttaacgtgtggtacatgatagaccggcaactccatgacaaacggcgtcgcttcaccgcgcatgatggtgtacttgagcatcaggccagtcagcaccgccatcacaatacccagcatatacagcgagaagaccgccagcgcaccgttctgcccgaagaaggcagccgcgaatactgcgaagatagccagacgcgcgccgcaggacataaacggtgccatcatgatggtcatcagacgttcacgcggtgcatcaagcgtacgtgcacccattaccgacggtacgttacaaccgaaaccgacgatcagcggcacaaaggatttccccggcaagcccagcgcctgcatcagacggtccatcacaaacgccgcacgcgccatatacccggagtcctcaaggaaggagaggaacaggtacatcatgccaatctgcggcaccagtggcagcacggtgttaatgccgccacccaggccctgggcgaggaagatagtcagccagtccgggaagtggagcgtgtagccaatccattgaataccatgcacaaatagcgccacggagccgacgtcaaacagcggctgtaacgccccgccgatgttgatagccagcaggaacatcaggtacatcacaaagaggaaaatcggcagaccgaggaaacggttgagcacgattttatctaccgcagtggtgaaacggctgggttctgccgtcagggtgttgcttaccacatcacagatggcagcaatgcactggtaacgcgcatcggcaatgtgcagcgccggatcgtccatctcattacgcagacgggcgagggcggcatccagatgctgcgacgcttcaccggcgtaggcgcggctgtagatatcgccttccagcatttgcaggcccagccagcgacgttgtttcagcgggatgtcggaaggcatcacttttgccagtgaatctgcttcgttgagcagcggctgtgcgtaatgcaccagttccacattctcgttagctttatagcgatcaatcgccagcttgagcgcttcaataccgcgaccacgggttgaaaccagcgggatcaccggacagcccagacgcgccgacagagcatcaatttcaatacgaatattttgcttctcggcaatgtcgagcatgttcagtgccacaatgcagggaatgccgagttccagcagttgtagcgtcaggtacaggttacgctcaaggttagacgcatccaccacgttaatcagcaggtcggcgtcgccactcaaaatgtagtgacaggcgatttgctcatcgagcgaggtctgcgatgagatggtggtcagagaataggtgccgggcaggtccaccagcgtgacctgatgatcggtggtggagaattgcccttctttacgttcgacggtaacgccagcccagttacctacacgctgacgtgagccagtgagctggttaaataacgttgtcttgccagaatttggattaccaattaagccaatggttaattttttcattgttgttatcaccgtattaacaggaaaccgcttccacttctaataaggccagatcttttttgcgtaataccaggctcacacgacgggtttcgatatgaatggggtcgccgagtggagcgacgcgcaccacattaaaagaggagccaggtaacatgccaagagaaagcagtttttggcgatatgccgggctgatttcacgggaaaagccagtgattttccacgcagtatctggagtgtattgcataggtgcctacttgtttctcattaactggataactacctcatggggcgtttgacagcgacatgagaccagatgatttgccaacaaaggagagattaaataatcaacaacacaatgataatgagaatggtttctatcagcaatacttaaaatgtgtgcgaatgttggtttgaataataatctgactcaatgttgatgtggctcaaggttatatcgcagcgaaaatataattcgaatagtgaattacccggactggctaatgtttaattaaggtttcagttgttaatgaaatgataaatattgccggaatatattatgagtttggctgtggaataaaaatgccggagatattctccggcacttttatgtcaggcaaggcgttcgttgccagatgcggcgtgaacgccttatctgccctacgatttcgtgcaaattcgaaccgtaggccagtacgggcgtttaacgttttttgcccattgccgccgccagcgcatccatcatcgcgctattaccggcaggctgcgcttcacgaccgcgtggtttggctgccgggcggttgttttgcgggcgttcattaccgccgccgcgacgagcgttggtttcgccaggctgctcatccaggcgcatagtcagggcgatacgtttacgctgaagatccacttccagcactttcaccttcacaatgtcgcccgctttcaccacggtatgcggatcttccacaaacttgttcgacaatgaagagatgtgaaccaggccgtcctgatgcacgccaatatcgacaaacgcgccaaagttggtgacgttggtcactgcgccttcgaggatcatacccggttgcaggtcgttcattgtctcgacgccatcggcaaactgagcggttttaaattccggacgcggatcgcgacccggtttttccagctctttgatgatgtcggttaccgtcggcacaccgaatttctcatcagtaaagtcagacgctttcaggttacgcagttcgctgctgttacccatcagatctttcagtgcctgctgtgttgctgccagaatgcgttccaccaccggataggcttccgggtgaacggtagacgcgtccagcgggttatcaccgtggttaatgcgcaagaagcccgcgcactgctcgaaggctttcggccccagacggctcacttttaacagttgctgacggttctggaactgaccgttctcatcgcgccaggcaacgatgttttgcgccatcatgcgcgtcaggcccgccacgcgggttaacagcggaacagaagcagtgttgagatcgacgccaacggcgtttacgcagtcttctactactgcgtccagtttgcgggccagttgcgtctggctgacgtcatgctgatactgacctacgccgatagatttcggatcgattttcaccagctccgccagcggatcctgcaaacggcgggcgatagacaccgcgccacgcagcgaaacgtcgagatccgggaactcctgtgcagccagctcggaagccgagtaaaccgacgcgcctgcttcgctgacgattactttctgcgcggtcactttcgggaactgcttctgcacatcgagatagaaacgctcagtttcgcgggaagctgtaccgttaccgatcgctaccagttcaacgttatgtttttcacacagcgcagcaacggtcatcgctgcttttgcggcctgtccggtgtgcgggtaaatggtgtcggtcgccaccagtttgccagtggcatcgaccaccgccacttttaccccagtacgcagacccggatcgaggcccatcgttgcacgcagtccggcaggggccgccatcagcagatcgtgcaggttacgggcaaagacgttgattgcttcatcttccgcacgttcgcgcacggtgcccatcagttcggtttccagatgcatcagcaccttgatgcgccacgtccagctcaccacgcctttgcgccagctatccgccggggcattgttcaggcgcaggccaaggtgatccatgatgatttgctcgcaatagctctctttgggcggctcatcgaactgtggatcggcattcagcgaaagctgaagtacgccttcgttacgcccacggaacatcgccagcgcgcggtgagaaggcaccgtggacaacggttcgtgatgatcgaaatagtcgcggaatttcgccccttcctcttctttaccgctcaccaccgtagaaaccaaatgcgcgttcttccacagataatcacgcactttcgccagcagcgcggcatcttcggcaaaccgttccatcaggatatagcgcgcgccatccagcgcggctttggtatctgccacgcctttatcggcataaacatattgtgcagcggcgacttctggcgtgtgtgacggatcgctccacagcaggtcagccaacggctcaagccctgcttcaatggcgatttgcccgcgggtgcggcgtttaggtttgtagggcaggtagaggtcttcgagttcggttttgcttagggtggcgttgatggccttcgccagatcatcggtgagtttgccttgctcggaaatggacttgaggatcgcctgacgtctctcttccagctcgcgcagatagctcagacgcgtttccagattacgcagctgcgtgtcatccagaccgccggtgatttccttacgataacgtgcgataaacggcacggtattcccttcgtcaagcaggcgaacggcagcgtcaacctgttccgggcgcgcctgaatttcacccgcaataatgcggcagaacgaatcattcatcatggtttgagttcatcttttcggatcaaaaatcaggggatagttatacggactggctggcaaaaatgccagccatcggcaggaggttaagactcttccttacggtttcacgtactcgatagcattaacataccagctcgcttccccggcaggggtattcaccaccgccagatcgccgacttcttttttcagcaatgcgcgggccatcggggaatcgatagagatgtaatctttacggccaaaaatttcatcgtagccgacaatacggaaacggtgagtcacgccatcgtcgttttcaatctccacccacgcgccaaaaaagactttgccttcctgctgaggggagtaatcgacgattttgagattttccaggcatttagtgagatagcgcacgcgacggtcgatttcacgcagacgctttttattatactgatagtcagcattttcgctgcggtcgcccagacttgcggcccaggtcaccttttttgtgacctccgggcgttcttcacgccagagataattaagctcttgtttgagtttttcatacccttcccgggtaaccaggggcgttttcatctcgttgattccctttgtctgtttgataatgcgcacattgggtataacgtgatcatatcaacagaatcaataatgtttcgccgaataaattgtatacttaagctgctgtttaatatgctttgtaacaatttaggctgaaattcataccagatttagctggtgacgaacgtgagcttttttaagaatacacgcttacaaattgttgcgaacctttgggagtacaaacaatgcaagagaactacaagattctggtggtcgatgacgacatgcgcctgcgtgcgctgctggaacgttatctcaccgaacaaggcttccaggttcgaagcgtcgctaatgcagaacagatggatcgcctgctgactcgtgaatctttccatcttatggtactggatttaatgttacctggtgaagatggcttgtcgatttgccgacgtcttcgtagtcagagcaacccgatgccgatcattatggtgacggcgaaaggggaagaagtggaccgtatcgtaggcctggagattggcgctgacgactacattccaaaaccgtttaacccgcgtgaactgctggcccgtatccgtgcggtgctgcgtcgtcaggcgaacgaactgccaggcgcaccgtcacaggaagaggcggtaattgctttcggtaagttcaaacttaacctcggtacgcgcgaaatgttccgcgaagacgagccgatgccgctcaccagcggtgagtttgcggtactgaaggcactggtcagccatccgcgtgagccgctctcccgcgataagctgatgaaccttgcccgtggtcgtgaatattccgcaatggaacgctccatcgacgtgcagatttcgcgtctgcgccgcatggtggaagaagatccagcgcatccgcgttacattcagaccgtctggggtctgggctacgtctttgtaccggacggctctaaagcatgaggcgattgcgcttctcgccacgaagttcatttgcccgtacgttattgctcatcgtcaccttgctgttcgccagcctggtgacgacttatctggtggtgctgaacttcgcgattttgccgagcctccagcagtttaataaagtcctcgcgtacgaagtgcgtatgttgatgaccgacaaactgcaactggaggacggcacgcagttggttgtgcctcccgctttccgtcgggagatctaccgtgagctggggatctctctctactccaacgaggctgccgaagaggcaggtctgcgttgggcgcaacactatgaattcttaagccatcagatggcgcagcaactgggcggcccgacggaagtgcgcgttgaggtcaacaaaagttcgcctgtcgtctggctgaaaacctggctgtcgcccaatatctgggtacgcgtgccgctgaccgaaattcatcagggcgatttctctccgctgttccgctatacgctggcgattatgctattggcgataggcggggcgtggctgtttattcgtatccagaaccgaccgttggtcgatctcgaacacgcagccttgcaggttggtaaagggattattccgccgccgctgcgtgagtatggcgcttcggaggtgcgttccgttacccgtgcctttaaccatatggcggctggtgttaagcaactggcggatgaccgcacgctgctgatggcgggggtaagtcacgacttgcgcacgccgctgacgcgtattcgcctggcgactgagatgatgagcgagcaggatggctatctggcagaatcgatcaataaagatatcgaagagtgcaacgccatcattgagcagtttatcgactacctgcgcaccgggcaggagatgccgatggaaatggcggatcttaatgcagtactcggtgaggtgattgctgccgaaagtggctatgagcgggaaattgaaaccgcgctttaccccggcagcattgaagtgaaaatgcacccgctgtcgatcaaacgcgcggtggcgaatatggtggtcaacgccgcccgttatggcaatggctggatcaaagtcagcagcggaacggagccgaatcgcgcctggttccaggtggaagatgacggtccgggaattgcgccggaacaacgtaagcacctgttccagccgtttgtccgcggcgacagtgcgcgcaccattagcggcacgggattagggctggcaattgtgcagcgtatcgtggataaccataacgggatgctggagcttggcaccagcgagcggggcgggctttccattcgcgcctggctgccagtgccggtaacgcgggcgcagggcacgacaaaagaagggtaaataaacgggaggcgaaggtgcctcccgttttgctttctataagatactggatagatattctccagcttcaaatcattacagtttcggaccagccgctaccagcgcggcacccgcaggggtgtcggtgtatttatcgaagttgtcgataaacagtttcgccagggtttcggctttttcctgccactgttccggagaagcgtaggtgttacgcggatcgagaatcttcgtgtctacgcccggcagttcggttgggatcgccaggttaaacatcggcagagtgaaggtttctgcattatccagcgaaccgttgaggatggcgtcgataatggcgcgggtatctttaatcgagatacgtttgccagtgccgttccagccagtgttaaccagataagcctgcgcgcccgccgcctgcatacgtttcaccagcacttctgcgtactgagtcgggtgcagcgacaggaatgccgcgccgaagcaagcggagaaggttggcgtcggttcggtgatgccacgctcagtaccggccagtttggcggtgaagccagagaggaagtgatactgggtttgatcggcagtcaggcgagaaaccggcggcaacacgccgaaagcatcagcagtcaggaagataaccttagtcgcgtggcccgctttggaaaccggcttaacaatgttatcgatgtgatagatcggataagaaacgcgggtgttctcggtttttgaaccatcatcaaagtcgatagtgccatcttcacgcacggtgacgttttccagcaacgcatcacgacggatagcgttgtagatttcaggttccgcttctttcgacagcttgatagtttttgcgtagcagccgccttcgaagttaaacacgccgtcatcgtcccagccgtgttcgtcatcgccaatcaggcgacgtttcgggtcggtggaaagggtggttttaccggtgccggaaaggccgaagaacaccgcaacatcgcctttctcaccaacgttggcggagcagtgcatagaagcgatacctttcagcggcagcaggtagttcatcatcgagaacatccctttcttcatttcgccgccgtaccaggtgccgccaatcagctgcatgcgctcggtcaggttaaacgccacgaagttttcggagttgagaccctgttctttccactgcgggttagtgcacttcgcgccgttcataacgataaagtctggtttgaaacctgccagttcttcatcgctcgggcgaataaacatgtttttgacaaaatgcgcctgccaggccacttcggtgatgaaacggacggaaagacgagtatccgggttcgcaccacagaaagcgtcgacaacgaacagacgtttgccggaaagctgcctggtcaccaggcctttcagatgctgccaggtttccggagagagaggtttgttgtcgttcttacctttgcctttgtctgcccaccagaaagtatcgcgagtggtatcgtcacggacgatatacttatcttttggtgaacgaccggtgaagatcccggtatcgacggcaacggcacccagattagttaacaccccgcgctcataacctgtcaggctcggatcgagctcttcctgatacagcaggtcgtagcttgggttgtaaacgatatcatgtacgtcactgataccataagcctcgagttcttgcggggtcaaaccattgttaacgcgcatttcactgctccttagccaatatgtattgcctgaatagtaaagtctttttgggggtgttaaccgcgacaaggctcatagatttacgtatctggagaaattcatatttgacaaaaaactccgtgattcctgtcacgaaacggttgctattatcgcagaaatagcattttaggtgtggaaaatgttctcaaaaggttaaatcttggtttatatggcgggaatattgtgagtggaatcgcattcctgaatgaaattgatgcaaattcaaccggtaaagtatcgattcaccacgctaactttttttgattattttctgaaaaaagcaaaatactactgcccggatgcgataattaacccaccttttgattctggataaccaacatggataacgttgaactttcacccgcaacacgctgggggatgattgctaccggattacttcagggtctggtttgctacctgctgatcgcctggctttccggaaaaaatcacagttggattgtttatggcgtgcctgcgaccgtcgcgttttcatccgttttactcttctccgtgatctcttttaaacagaagcgcctttggggatggctggcgctagtgtttattgccacgctggggatgagcggctggctgaagtggcaaactgatggcatgaacccctggagagctgaaaaggcgctttgggattttggttgctatctgctgttgatggcaatgttgttgctaccgtggatacaacaaagccttcgcatccgcaatgacagtagccgctatcgctatttttaccagtcagtatggcataacgtacttatattactggtgatttttctcgccaatggcttgacgtggctggtgcttttactgtggagtgagttgtttaaacttgttggcatcacgtttttcaatacgctcttttttgcaaccgactggtttatttatctcacgttaggtctggttaccgcgctggcggtgatcctcgcgcgaacacagtcacgtttaatcgactctattcaaaagttgttcacgttaatcgccacggggttgctgccgttagtatcattgctaaccctgatgtttatcatcaccctgccgtttacgggcctgagcgcgatttctcgccacatctccgccgccgggttgctgttgacgctggcctttttgcaattgatcttaatggctattgtccgcgatccgcaaaaagcgtcacttccctggacagggccgttgcgttgcctgattaaaaccgctttgctggttgctccgctgtatgtgttcgtcgccgcctgggcgttatggctgcgggtcgctcagtacggctggactgtcgaccgcttgcagggcgtgctggcggtgctggtgttactggtgtggtcgctggggtattttgtcagcatcgtctggcgtaaagggcaaaatcccgttgttcttcagggcaaagtgaaccttgcggtttcgttattggtgttggtgatactggtgcttcttaattcgccggtgctggacagtatgcgcattagcgtgaacagccatatggcgcgttatcagagcggcaaaaacacgtcagaccaggtaactatctacatgctcgagcagagcggtcgctatggacgtgctgcgcttgagtcgctgaaaagcgatgccgggtttatgaaagacccgaaacgcgcgcgggatctgctgatggcgttagatggagagcaacatcttcagcaacaggtatcggaaaaagtattagccgataatgtgttaattgcccctggttctgttaaacctgatgcgacattctggtcggccttaatccaggatcgctataacgtgatgacctgtattgaaaaagacgcctgcgtcctggtcgagcaagatctgaatagtgatggtcaggcggagcggatcctgtttgcttttaatgatgacagagtcattgtctatggctttgactcagacagaaaagaatgggacgcgcttgatatgagtttacttccgaacgaaataacgaaagaaaaattactcacagctgcgaaggatggaaaactggggacgaagcctaaagcgtggcgcgatcttgtagtggatggtgaaaggctgaatgtgaatctgaatgagtgacaaagcgcatcaggtgtattagtcgtaaaatccggcagagccctctctgccggacatactcattaatgaacttgcggatctgccggagacgcgttgttgcggatttcagcaatatccatcgcattgaacagatagtggttaccgcagtaatcacaatgcatgtcaatttcgccatcttccgccaggatgctatcaacttcttcatcaggcagcgttttcagcgcatcggcgcaacgttcacgcgagcaggtgcatttgaactccacatcctgcggatcgtaaaccgtcacctcttcttcgtgatacaaacgccacaacacttcgtttgccggtaaggtcagcagttcttcggttttgatggtttcggttagcgtcgccaggtggtcaaagtcgtcctgctgggcattttgcgcaggcattacctgcaacaacataccgcctgcagccggtttgccgtctacgtcgccggtgcgaataaacaggcgcgtcggcagctgttcagaacgcataaagtaatcttccaggcaggccgccagggtatcaccttccagaccaactacgccctgatagcgttcgccttcgctcggggtaatggtgatcaccacgtaaccattgccgaccagcgttttcaggtcggcattttctggaatttcgccctgcacgcgcgccacaccgcgcatctgctggttattgttaccgttaataaccgccagattcatcggaccgtcgccctgcagctgtacggtgatatcaccatcaaacttcagcgtagcggttaacaggctggtcgcaaccagcagttctgccagcacgtttttaacgggctgcggataatcgtggttctcaaggatctgttgcagggtttccgaaacggttaccagttcgccgcgcacggcaaagttttcaaacagatagcgatgtaattggtcatgttgcggcataatcatctctcttgcaggtgacagttattcactgtcgccgtgtttaaatcgtaacaggtcgcggcgctcttttttgtccgggcgtcggtccgggtgcggcatggttaaggcattaagtttacgtgccagcgccattttttcgcgtttctctacactttccgcagtctcttcatacagcaaggctgcctcgctggcggggcgacgctgttcagtaatcgcctttacaatcaccgtgcgttcgtcatttccctggcgcagagtgagcgtggcattcagctcgacgattttgctcggcttgctgcgctgcccgttgtaatgcaccttaccgccttcaatcatttcacgggccagcgcgcgggttttataaaaacgggcagcccatagccatttatccagtcgaacctcaacagcaggtttctctttcatggcgtctccttcacattagcgaggggatcaggcggcggtagtcattcagtgacggatggcgttgatactgtttctcggcaatcccggaatcaggattagtcacgccgaggcagtaacgaataccaaattgcgcggcagcatcgagaatcgcttcgctgtcatcaataaacagcgttctttcagctttcagacccgtagcttcggccaccgcatgccataaccgctgatcctctttcggataaccaaatgtgtgggtggaaagtaataaatcaaggtgtgcgtccagaccggtatgctcaagttttaccgccaggttgtgcggatgcgcattggtgagcaaaattcgctgcttaccgctggctttcagtgcctcaagaaacggaatggtatcttcacgcagtacggcacgcggtcccatctcggtggtcatcgcacagatatccagacccagttgctcactccagtaatcaagacagtaccagtttagcgtatgctgtacgtcgtgatattgctggcgcatatattccatcgcttcctgtggcgtaaccccgtttttcgcgccccatgtttcaggcaccagcttttgccagaaatagttatcgaaggcgaggtcgagcaacgtgccgtccatatccagcagaacggtatctacgtcctgccaggcaatgttgatatgcatgagggaaatctccagagtgaagcaatttgcgcgacagggtagcataacctgccgcgcaaacgtgttattcgataaggctttctgaaggggtgatcagttgcgggttcaggcagctttcataataggcctgaatctccatcatgcgagtgcgatgacgctggtaacgacgccaggcctgtacgccattgtaaatggcgctacccagcatcgtcagtagcagcaatgtggtgctgagatagcgccacaggccggaacgatccgggatcggatgaaggccaatatgctgcgtaccattggcgtcagtgaagatttttgtgacgataccctcggcgttaaacggcgtatgcatcagcatttgtgccagtttctggaaagcgttccactgttcttgcggcgggtagtcgtaaagtgatgccgaaggccagggctgatcaacaaaatcgctgccttcgtcgctgacaatcaggaatccgccgggggccggactgtttagtgattgtgccgctcgcgccgtttcatgcgtgataaacggcgcggtggaggttgccaccaggttatccagcgattccgcactcaccgggcgtaataacacattcacgccatcgagcttcccggcgttggcgcgttttaccagcgcgtcccagtctttactgttgccgagattgaccagcgcatttttcagtcgcacacagtcatctttggcagaacataaatccgctgtcttcagtacaatgtcgccaaaatcatcaagcaataccatgccggatttttgaattgctgaacgtaatgaggcactgacgcgagattcatcttccggtttagggtgcagctggcgattaactgcttcagtcaatgccgtcgctttgttgaccagttcagattctggtaatggcaatgagcgggcgtcgttccagatgatctgcgagcagtcaaacggtaaaaaaggtgaattggttttcgcgctccaggttccggaagttcgaatattacacattcccgtaccgctaatacgcaatgtatcgcctacccgcacgccagcgtcagccagttgttttacgctggtggcttcaatggtctgcgcgcctttcatccatgagagagtgaatttcagcggcatatccagcgggatccagaataacagcataaacagcaccagcagcgagcccgcagcgataatcgtactgcgcagccagtgctgtaacggaaagttttttacttcatcatgcagcgaaagatatcgtccctgacgcactacatggcggtcgagatagatatcgatatcggtttgttgaccgagatcctgagcaatgtatggctgccagtgtgcgggatagaccaggtcgataataccgagtgaaatattgttgatctgttcctgatcgttttcgccaaacaatccccaacgacggggtgtaccgcgcagacaatgaatttcccgcagggaggattttgccgggggcgcgaatagcccccacagacctgcgcccagcagcagtaacgcgccgcctgccagccacggaacaaatacatccggggtaatcaggcagaaaaagaacatcaggaaggaggcgacgatcagcaacgcttcacgcagcccgcgcggacgactcagcgcatattcttcatgcgtttctttgcgaatattgagtagctcgatttgctcactctcttccccgcgaatcgacgcctgcgttgacggaacaggttgcaaggcatagctgcgagtttcctgcatgtactcctgcagcgtatgaccgttgagtgaaataaccagcggcagcgaatcggtatgaatcagttcaacggtattctcatcgttgatgtactgttcccagaaagggggcaggtggacttctaccgaatcgaggtagtaacgccatttattcggatcgtcggtagagatgccgtaacgcgtgatagcgtgtgtcagcatcatgacgttgttgctttcggcattcagcgccagagagatcggtgccgcgctggctcccgttgggccaggcacctgtaatacctgcgtcaggctctcaagataattttcaacggcgctacgttcttcaggtgtgagtttacgcgtttgcgcatccgcgaaggcgttggtccagggcagctgacgccgtctggatcgcacttttatcagccatcccgcaagtagtgagcaggccagcaaagcagctaaaaaaatcacaatggtgctcatgctttccccatcttacttagtctgtcaggcgtggtcagtcgcaccggacacaatacatgattctgcggttggctatcggcaagcgtggagtttaacttgagcatcattaagcacatcacagtaaccgctgatcatagcaaaccctctgaaggcggaatatcagcaaattcctggagttatttcaacctattgacttttaatttgatttgaggacgattatttattaagttacataaatgtaaataacatgcaattcacattgccgaaagcgtgtccgatatcgcacaataaccgctgatttcacagcatagatcccacgatgagcaaatcattacaaaaacccaccattctgaatgttgaaactgtagcccgttcccgactgtttaccgtcgagagcgtggatctggagttcagcaatggcgtgcggcgtgtttatgaacgaatgcgtccaaccaaccgggaagcagtgatgattgtgccgattgtggacgatcacctgatcctgatccgcgaatacgcagtgggaactgaatcctacgaattaggtttttcgaaaggattaattgatccgggtgaaagcgtctacgaagccgctaaccgcgagctaaaagaagaggttggatttggagcgaacgatctgacttttttgaagaagctcagcatggcaccgtcttacttttccagcaaaatgaatatcgtggtagcgcaagatctctacccggaatcactggaaggcgatgagccagagccgctaccacaggtgcgctggccgctggcgcatatgatggatttgctggaagaccctgacttcaatgaagcgcgcaatgtcagtgcgctgttcctcgtgcgcgaatggttgaaagggcaggggcgagtgtaaatgcgtgaagtttgcctgatgcacaatgtttatcaggcttatggggtttctgcaatttattgagttttcacgattttgttagccggataacgcgttcacgccgtatccggcataaacaagtgcactttgtcagcaaactgaaaaggcgccgaagcgcctttttaatcagaacaattcctgtgcctcgccattatcgataatggtcgttcccacctcgtgcactgcctgttgtgtcggctgcgtaccttcgatgaaatactcttcgcggctgttgccaccattagctaactgcccggtgctgcgatcgatattcaccgtcacaatacccggtggcggcgtcagcggctgctccggcacaccttcaagaacggctttcatataagcgtcccatgcaggctgggcactcttggcaccgccttcgtaacctgagatctgatctttaatcgctccggaagccgttgtatgaccgagattacgacggtgatcatcaaagccaatccagaccgaggtcacaacgcccggaccgtaacccgagaaccacgcatctttcgaactgttagtggtcccggttttcccgccgatatcgcgacgctgcaaatcacgacctgcacgccagccagtaccctgccagcctggctcaccaaagatattggtgttcaaagcactcttaatcaggaatgccagcggagtgttgatgacgtgcggtgcgtactcctgcgcgccagtcttcgccactaacgcctgatttgcctgctccagctgcggcattggtacagaaacattctgctgctcgcgggagatagcgacatcttcaacatcgttattttccagcacgttcgatttctgcgtatcaccgtaaatcaccggaatatcgcattccgggcaggctactttcggtttcgcttcgaaaatcacgccgccctgatcgttttcaattttgctgataaaccacgggtccaccaggaagccgccgttcgccatgaccgcgtagccgcgcgccacctgcattggggtgaaggacgctgaacccagcgccagcgattcggtgtggacaatgttttgtgccgggaagccgaagcgttgcagatattctgcagcgtagtcgacgcccatcgcccgcattgcgcgtaccatcaccacgtttttcgactgacccagcccctgacgtaagcgaattggaccagcatactgcggtggtgagttcttcggctgccagtcagaaccggcacttgcatcccagcgagaaattggcacatcgttcaacatacttgccagcgtcagacctttatccatcgccgcggtgtagaggaacggtttgatgttggaacccacctgacgcagtgcctgggtggcgcggttaaacttgctctgattgaaatcaaagccaccgaccagcgccataacggcaccgttttgcggattgatcgacaccagcgccgagttcacttccggcacttgtgccagccaccatgcatcgccaacctgacgaacccagatttgctgacccgtttgcagaacatcggtcactttacgcggcgtcggtccttgctgagtatccgaacggtaaggacgcgcccagcgaacgccttccatactcaatgcgacggtcgacccgtccgccagcatcgccgtcgcttgctgaggattggcgctggtgactgcggcaggcagcagcggaccataggttggcagcgccttcagcgtatcggtaatcttgttgttatcccacgccgactcgcccactttccacagcacatttgccgggccgcgatagccgtggcgcatgtcgtagtccagcacgttattacgtaccgcctgctgcgcggcctgctgcactttgcgggtgatggtggtgtaaatgcgataaccgtcttcataggcactttcgccataacggttatacatctcctggcgcaccatttcgctcaggtacggcgcagagaaagcaatctccggcgcgtgatagttagcgttaatcgcctcagtgcgtgtctgatcgaactgttgttgggtgatatacccttcatccagcatccgcgacagcacgacgttacgccgcgcgacggcacgatccatcgagtagagcgggttgaaggtggaaggcgctttcggcagcccggctatcaccgccatttcgttcagcgtcagttggtcgaccgtttttccgaaatagacttgtgccgcagcaccgacaccataggcgcggtaaccaaggtaaatcttgttcagataaagctcgaggatctcgtctttcgtcagcagctgttcaatgcgaatcgcgaggaagacttccttaatcttacgcatcagcgtgcgttctggactgaggaagaagtttctcgccagctgctgggtaatggtacttgccccttgtgacgcgtgaccggagaacagcgccacgcttgctgcacggaagatccccaccgggtcaacgccgtgatgctcgtagaagcggctgtcttctgtcgcgataaaggctttcaccatctccggtgggatttgatccaacgtaaccggaatacgacgtttctcaccgtattgagcaatcagctcgccatcggcgctgtaaatctgcatcggaatttgcaggcgaacatcttttaatgtcgccacatccggcagttgtggctcgatgtagcggtataggccataaatcgagcctgctcccagcagaatgcaacagactgcaaggatcaaaaaatactttacgaacttcactggaaatttcccatttagtttcatttgggcagtttataaacaaacgcgcggtagtataaaggcaagccagacgcattgatatacccgtcagagtgacgggtgataaggagatcatcacaatggcatttaagatctggcaaattggtttgcatttacaacagcaagaagcggtagcggttgcgatcgtgcggggcgcaaaagaatgctttttgcaacgctggtggcggttgccgctggagaacgacattatcaaagatgggcggattgttgatgcgcagcagctggctaaaacgttgttaccgtggagtcgcgaactgccgcagcgtcatcacattatgttggcgtttcccgccagtcgcacattacagcggtcatttccgcgcccgtcgatgtcccttggtgagcgggagcaaacggcctggctgtcagggacgatggcccgcgagctggatatggatccggactccctgcgcttcgattacagcgaagactcactcagtcccgcctataacgtgactgccgcgcaaagcaaagagctggcaacgctgcttactctggcagaaaggttgcgtgttcatgtgagcgcgatcaccccggatgccagtgcattacagcgattcctgccttttttaccttctcatcagcaatgtctggcctggcgtgataacgaacagtggctgtgggcgacgcgctatagctgggggcgcaaactggcggtggggatgactagcgcgaaggagctggcggcagcgttatccgttgatcccgaaagcgtcgcgatatgtggcgaaggcggatttgatccctgggaggccgtttctgttcgtcagccgccgctaccgccgccaggtggagactttgccatcgcgctggggctggcgcttgggaaggcgtactgatgaacccgccaattaattttttgccctggcgacagcaacgccggaccgcttttctgcgtttctggttgctgatgttcgttgcgcctctgctgctggccgtcgggataacgctaatactgcgtctgacaggcagcgccgaagcgcgcatagacgcagttttgcttcaggcggaacaacaactcgcccgcagcttacagataacgaagccacgtttgctggagcaacagcagttacgcgaacagcgttcgcaacggcagcgccagcgacaatttacccgcgactggcaatctgcgctggaagcactggcggcgcttttacccgagcacgcctggctgacaacgataagctggcagcagggaacgctggagatcaaggggctgacaacaagcattaccgcgttaaacgcactagaaacgtcactccgccaggatgcatcttttcatctcaatcagcggggagccacgcagcaggatgcgcagggacgctggcaatttgagtatcagttaacaaggaaggttagcgatgaacatgttctttgactggtggttcgccacatcaccccgcctccgccagctttgctgggcattctggttgctgatgttagttacgctcatttttctgtcatcgacacaccatgaagagcgcgacgcattaattcgactacgggcaagtcatcaccagcagtgggccgcactgtatcgcctggtagacaccgctcccttcagcgaggaaaaaacgctgcccttttcgccactggattttcagttatccggcgcgcaactggtttcctggcatccatccgcgcagggaggcgagttggcgttgaaaacgctgtgggaagcagtgccgtcggcatttacacggctggcagagcgcaacgtcagcgtgagccgtttttcgttaagcgtggaaggtgatgatcttttgttcacgctacaactggagacgccgcatgagggttaaacgctggttgttggcaggtattgcattgtgccttttaaccggtatgcgtgacccttttaaaccgccggaagatctatgccggattagcgaacttagccagtggcgctatcaggggatggtagggcgaggcgagcgcatcatcggtgtaataaaagacgggcaaaagaaatggcgacgggtgcagcaaaacgatgtgctggaaaacggctggacaattttacagctgacgccagacgtactaacgctgggtaccgggacaaactgcgaaccgccacaatggttgtggcaacggcaaggagatacaaatgaagcaatggatagccgcactactgttgatgctgatacccggcgtacaggcggcaaagccgcaaaaagtgacgctgatggtggatgacgttccggtagctcaggtgttgcaggcgctggctgaacaggagaagttgaacctggtcgtgtcgccagacgtcagcggtacggtgtcgttacatctaacagatgttccctggaagcaggcactacaaactgtagtgaaaagcgccggactgataacgcggcaggaaggcaacattctctcagtgcattccattgcctggcagaataacaatatcgcccgccaggaggcggagcaggcgcgggcgcaggcaaatctgccgctggaaaatcgcagtataaccctgcaatacgccgacgcgggagaactggcgaaagcgggggagaagctactgagtgccaaagggagtatgaccgtcgataaacgcaccaatcgccttttgctacgagataacaaaacggcgttaagcgcgcttgaacagtgggtagcgcaaatggatctgccggtcgggcaggttgagctgtcggcgcatattgtcaccattaatgaaaaaagtttgcgtgagttaggcgtgaaatggacgctggccgatgcgcaacacgctggtggcgttgggcaagtcaccacgcttggtagcgacctctccgtagcgacggcgacaacgcatgtcggttttaacattgggcgcatcaacggacgcttgctggatcttgagctttccgcgctcgaacaaaaacagcagctggatattatcgccagtccgcgtctgctggcctcacatcttcagcctgccagcattaaacaggggagcgaaattccatatcaggtttccagcggggaaagtggcgcgacgtcggtggaatttaaagaggccgtcctggggatggaggtcacgcccacggtgttacaaaaaggtcgcatccggctgaaattacacatcagccagaacgttccggggcaggtgctacagcaggccgatggcgaagtgctggcgattgataagcaggagatcgaaacgcaggtcgaggtcaaaagcggagaaacgttggcgctgggcggcatttttacccgtaaaaataaatcgggtcaggatagcgtaccgttgcttggcgacattccctggttcgggcaattatttcgtcatgacggaaaagaagatgaacgacgcgagttagtggtgtttatcacgccacgactggtttccagtgagtaaacagccgtaaaagcggtaatgtttttacgctgaacgtgtttcatctatttgacgcgcgcaggtatttagcatacaaggagtaccgatttgagagttggtgctcttcgctgcctgcgttccatgatgatgatttatcattcaggcggcattttgctgtcttttttacgctaatcttacccggtgatttatcgccagagcggtggtagcaaggcagcgcgcttgcagcgaccagatatgcagagggatgggtgatttattcagttgccaaacccgctggagtattgagataattttcagtctgactctcgcaatatcttatgaggtttcagttcatgtcctgcggcgctctctgagcgaagcgggtttatcattaacgaatagtcttagtagtaccgaaaaaatggcagagaaacgcaatatctttctggttgggcctatgggtgccggaaaaagcactattgggcgccagttagctcaacaactcaatatggaattttacgattccgatcaagagattgagaaacgaaccggagctgatgtgggctgggttttcgatttagaaggcgaagaaggcttccgcgatcgcgaagaaaaggtcatcaatgagttgaccgagaaacagggtattgtgctggctactggcggcggctctgtgaaatcccgtgaaacgcgtaaccgtctttccgctcgtggcgttgtcgtttatcttgaaacgaccatcgaaaagcaacttgcacgcacgcagcgtgataaaaaacgcccgttgctgcacgttgaaacaccgccgcgtgaagttctggaagcgttggccaatgaacgcaatccgctgtatgaagagattgccgacgtgaccattcgtactgatgatcaaagcgctaaagtggttgcaaaccagattattcacatgctggaaagcaactaattctggctttatatacactcgtctgcgggtacagtaattaaggtggatgtcgcgttatggagaggattgtcgttactctcggggaacgtagttacccaattaccatcgcatctggtttgtttaatgaaccagcttcattcttaccgctgaaatcgggcgagcaggtcatgttggtcaccaacgaaaccctggctcctctgtatctcgataaggtccgcggcgtacttgaacaggcgggtgttaacgtcgatagcgttatcctccctgacggcgagcagtataaaagcctggctgtactcgataccgtctttacggcgttgttacaaaaaccgcatggtcgcgatactacgctggtggcgcttggcggcggcgtagtgggcgatctgaccggcttcgcggcggcgagttatcagcgcggtgtccgtttcattcaagtcccgacgacgttactgtcgcaggtcgattcctccgttggcggcaaaactgcggtcaaccatcccctcggtaaaaacatgattggcgcgttctaccaacctgcttcagtggtggtggatctcgactgtctgaaaacgcttcccccgcgtgagttagcgtcggggctggcagaagtcatcaaatacggcattattcttgacggtgcgttttttaactggctggaagagaatctggatgcgttgttgcgtctggacggtccggcaatggcgtactgtattcgccgttgttgtgaactgaaggcagaagttgtcgccgccgacgagcgcgaaaccgggttacgtgctttactgaatctgggacacacctttggtcatgccattgaagctgaaatggggtatggcaattggttacatggtgaagcggtcgctgcgggtatggtgatggcggcgcggacgtcggaacgtctcgggcagtttagttctgccgaaacgcagcgtattataaccctgctcaagcgggctgggttaccggtcaatgggccgcgcgaaatgtccgcgcaggcgtatttaccgcatatgctgcgtgacaagaaagtccttgcgggagagatgcgcttaattcttccgttggcaattggtaagagtgaagttcgcagcggcgtttcgcacgagcttgttcttaacgccattgccgattgtcaatcagcgtaacaacaagaaaggtcaggccgcttatcaagcggtctattagcttcaggttaattgcaacgtggtaagcattaaccttttagtggggtgttaaatggatgaattcaaaccagaagacgagctgaaacccgatcccagcgatcgtcgtactggtcgttctcgtcaatcttctgaacgttctgagcgtactgaacgtggcgaaccgcagatcaattttgatgatattgaacttgatgacactgacgatcgccgtccgactcgtgcgcaaaaagagcgcaatgaggaaccggaaatcgaagaagaaattgacgaatccgaagatgaaaccgtggatgaagagcgcgtagagcgtcgtccgcgtaagcgcaaaaaagcagccagtaaacccgcttctcgtcagtatatgatgatgggcgtcggcattctggttctactgctgttgatcatcggtatcggttctgcgctaaaagccccctcgaccacttccagcgatcaaaccgcgtctggcgagaagagtattgatcttgctggcaatgcgaccgatcaggcgaatggcgtgcagccagcgccgggaaccacgtctgcggaaaatactcagcaggatgtttctctgccaccgatctcttctacgccgactcaagggcaaaccccggtggcaacggatggtcaacaacgtgttgaagtgcagggtgacctgaacaatgcgctgacccagccacaaaatcagcaacagctgaacaatgtggcggtcaattccacgttgccgactgaacccgcaacggttgcgcctgttcgcaatggcaatgcatcgcgtgacacggcgaaaacgcaaaccgctgaacgtccgtccactacgcgcccagctcgtcagcaggcggtgattgaaccgaaaaaaccgcaagcaaccgtgaaaacggagccgaagccggtagcacagacgccgaagcgtactgaaccagctgcccctgtggcgagcacgaaggcaccggctgcgacttctacgccagcaccaaaagagacggcgactacggctccagtacagacggcatccccggcgcaaaccacagcaacacccgctgctggggcgaagaccgcaggtaatgttggttcgttgaaatcggcaccgtccagccattacactctgcagctgagcagttcctctaactacgacaacctgaacggttgggcgaagaaagagaatctgaaaaactacgttgtctatgaaacgacgcgtaatggtcagccgtggtatgtcctggtttctggcgtgtacgcttcgaaagaagaggcgaaaaaagcggtatctacattgccagcagatgtccaggccaaaaacccgtgggcgaaaccgctgcgtcaggtacaggccgatctgaagtaatcaaggttatctcccgcaatggtttatcgttgcgggagttgcctgaagcgctggatgctgtcggagctttctccacagccggagaaggtgtaattagttagtcagcatgaagaaaaatcgcgcttttttgaagtgggcagggggcaagtatcccctgcttgatgatattaaacggcatttgcccaagggcgaatgtctggttgagccttttgtaggtgccgggtcggtgtttctcaacaccgacttttctcgttatatccttgccgatatcaatagcgacctgatcagtctctataacattgtgaagatgcgtactgatgagtacgtacaggccgcacgcgagctgtttgttcccgaaacaaattgcgccgaggtttactatcagttccgcgaagagttcaacaaaagccaggatccgttccgtcgggcggtactgtttttatatttgaaccgctacggttacaacggcctgtgtcgttacaatctgcgcggtgagtttaacgtgccgttcggccgctacaaaaaaccctatttcccggaagcagagttgtatcacttcgctgaaaaagcgcagaatgcctttttctattgtgagtcttacgccgatagcatggcgcgcgcagatgatgcatccgtcgtctattgcgatccgccttatgcaccgctgtctgcgaccgccaactttacggcgtatcacacaaacagttttacgcttgaacaacaagcgcatctggcggagatcgccgaaggtctggttgagcgccatattccagtgctgatctccaatcacgatacgatgttaacgcgtgagtggtatcagcgcgcaaaattgcatgtcgtcaaagttcgacgcagtataagcagcaacggcggcacacgtaaaaaggtggacgaactgctggctttgtacaaaccaggagtcgtttcacccgcgaaaaaataattctcaaggagaagcggatgaaacagtatttgattgccccctcaattctgtcggctgattttgcccgcctgggtgaagataccgcaaaagccctggcagctggcgctgatgtcgtgcattttgacgtcatggataaccactatgttcccaatctgacgattgggccaatggtgctgaaatccttgcgtaactatggcattaccgcccctatcgacgtacacctgatggtgaaacccgtcgatcgcattgtgcctgatttcgctgccgctggtgccagcatcattacctttcatccagaagcctccgagcatgttgaccgcacgctgcaactgattaaagaaaatggctgtaaagcgggtctggtatttaacccggcgacacctctgagctatctggattacgtgatggataagctggatgtgatcctgctgatgtccgtcaaccctggtttcggcggtcagtctttcattcctcaaacactggataaactgcgcgaagtacgtcgccgtatcgacgagtctggctttgacattcgactagaagtggacggtggcgtgaaggtgaacaacattggcgaaatcgctgcggcgggcgcggatatgttcgtcgccggttcggcaatcttcgaccagccagactacaaaaaagtcattgatgaaatgcgcagtgaactggcaaaggtaagtcatgaataagtttgaagatattcgcggcgtcgcttttgatcttgatggtacgctggtcgacagtgctcctggtcttgctgctgcggtagatatggcgctgtatgcgctggagttgcccgtcgcaggtgaagaacgcgttattacctggattggtaacggcgcagatgttctgatggagcgcgcattgacctgggcgcgtcaggaacgtgcgactcagcgtaaaacaatgggtaaaccgcccgttgatgacgacattccggcagaagaacaggtacgtattctgcgtaaactgttcgatcgctactatggcgaggttgccgaagaggggacgtttttgttcccgcacgttgccgatacgttgggcgcgttgcaggctaaaggcctgccgctaggcctggtcaccaacaaaccgacgccgttcgtcgcgccgctgctcgaagccttagatatcgccaaatacttcagcgtggtgattggtggtgatgatgtgcaaaacaaaaaaccgcatccggacccgctgttactggtggctgagcggatgggaattgccccacaacagatgctgtttgtcggcgactcacgcaatgatattcaggcggcaaaagcggcaggttgcccatcagttggcttaacctacggatataactacggcgaggctatcgatctcagccagcctgatgtaatttatcagtctataaatgaccttctgcccgcattagggcttccgcatagcgaaaatcaggaatcgaaaaatgactaagcccatcgtttttagtggcgcacagccctcaggtgaattgaccattggtaactacatgggtgcgctgcgtcagtgggtaaacatgcaggatgactaccattgcatttactgtatcgttgaccaacacgcgatcaccgtgcgccaggatgcacagaagctgcgtaaagcgacgctggatacgctggccttgtatctggcttgtggtatcgatcctgagaaaagcaccatttttgttcagtcccacgtgccggaacatgcacagttaggctgggcactgaactgctatacctacttcggcgaactgagtcgcatgacgcagtttaaagataaatctgcgcgttatgccgagaacatcaacgctggtctgtttgactatccggtgctgatggcagcggacatcctgctgtatcaaactaatctggtaccggtgggtgaagaccagaaacagcacctcgaactgagccgcgatattgcccagcgtttcaacgcgctgtatggcgagatctttaaggtgccggagccgtttattccgaaatctggcgcgcgcgtaatgtcgctgctggagccgaccaagaagatgtccaagtctgacgataatcgcaataacgttatcggcctgctggaagatccgaaatcggtagtgaagaaaatcaaacgtgcggtcactgactccgacgagccgccggtagttcgctacgatgtgcagaacaaagcgggcgtttccaacctgttggatatcctttcagcggtaacgggccagagcatcccagaactggaaaaacagttcgaaggcaagatgtatggtcatctgaaaggtgaagtggctgatgccgtttccggtatgctgactgaattgcaggaacgctatcaccgtttccgcaacgatgaagccttcctgcaacaggtgatgaaagatggcgcggaaaaagccagcgcgcacgcttcccgtacgctaaaagcggtgtacgaagcgattggttttgtggcgaagccgtaattcactattgctggcaaattgcgctttgttcatgccggatgcggcgtgaacgccttatccggcctacaaagtaatgcacatattgcaaggaaatgtaggcctgataagcgtagcgcatcaggcaattttgcttttatcatcactctgaaaccggggaaacccggtttttttatcctcatttgcaataatccgaaaaaatgtgaagtgcctcgccgtttccacatctcgctgttgcgccttatcttcaaattcctgaagatataaatattcaatttactgaaaatttattatgcgtcgaacgtttatcaaaaaagaaggcgtcgtcatcacgacgctggcccgttatttgttgggtgaaaagtgcggtaatcgattgaaaaccatagatgagctggcaaatgaatgccgttcatccgttggcctgacgcaggccgcgttgaaaacgctggaatcaagcggagcgatacggattgaacgccgtgggcgcaatggcagttatctggtcgagatggataacaaagcattgctgactcatgtggatatcaacaacgtggtatgtgcaatgcccttgccctatacccgtttgtacgaaggcctggcgagcggattgaaagcccagtttgatggcattcctttttactatgcgcacatgcgtggcgcggatattcgcgtggagtgtctgcttaatggcgtgtatgacatggcggtggtttcgcgactagcggcggaaagttatctcacgcaaaaaggcttatgcctcgcgctggagttggggccgcacacctacgttggcgagcaccagttgatttgccgtaaaggcgagtccgcaaacgtgaagcgcgtggggctggataaccgttcggcggatcagaaaatcatgaccgatgttttttttggcggtagtgatgtggaacgagtcgatctctcttatcacgagagtttacaacgcattgttaaaggcgatgtcgatgcggtgatctggaacgtggtggcggaaaacgaactgaccatgctgggattagaggcgacgccgctcacagacgatccgcgatttttacaggccaccgaagccgtggtcctgacgcgagtcgatgattacccaatgcaacaactgctgcgtgccgttgtagataaacacgccctgctcgcccatcaacaacgggtagtgagtggggaacaggaaccgagttattaaacgaaaggcatctgatatggaaaccagactcaacctgctttgcgaggcaggcgttattgataaggacatctgcaaaggcatgatgcaggtcgtcaacgtactggaaacagagtgccatctgccggtgcgcagtgagcaaggaacgatggcgatgacacatatggcgagtgcactgatgcgcagtcgccgtggtgaagaaatagagccgctggataacgagttgctggcagaactggcgcaatccagccactggcaagccgttgtgcaattgcatcaggtgttgttgaaggaattcgcactggaagttaacccgtgtgaagaaggctatttgctggccaacctttatggattatggatggctgctaacgaagaggtttgaagctcccgacaaatccacgtcgcacaacctaaatattcaaaaaaatgaatatttaattcaaggaacagaaacgaggcaacaagatgtttgtagaagcattgaaacgccagaacccggcgctgatttccgccgcactaagcctgtggcagcagggcaagatcgccccggacagctgggtgatcgacgtggatcagatactggaaaacggtaagcggctgattgagacggcgcggctttacggcattgaactgtatctgatgaccaagcagtttggtcgtaatccgtggctggcggaaaaattgctggcattaggctacagcggcattgtggcggtggattacaaagaggcgcgagtcatgcgccgcgctggtttgcctgtggcgcatcaggggcatctggtacaaatcccttgtcatcaggttgctgacgccgttgaacagggcaccgacgtcatcaccgtgtttactctcgacaaagcgcgggaagtttctgcggcggcggtgaaggccgggcgaatccagtctgtgctgcttaaagtttatagcgacgatgattttctttatccgggccaggagagcggttttgccctcaaggtgttgccggagattgtcgccgaaatccagaatctgccagggctgcatttagccggacttacccatttcccttgcctgctttgggatgaggctgtcggaaaagttttgccgacaccgaatcttcacacgctgatacaggcacgggatcaactggcgaaatctggtattgcacttgagcaactgaacgcgccttcagcgaccagctgcacttcgctgccattactggcgcaatacggtgtgactcatgccgaacccggtcatgcgctgacgggcactattccggcaaaccagcagggcgatcagcctgaacgtatcgcgatgctctggttaagtgaaatctcccatcatttccgtggcgacagctactgctacggcggcggttactatcgtcgtggtcatgcgcaacatgcgttggtgtttacgccagaaaatcaaaagattactgaaaccaatctcaaaactgtggatgacagcagtatcgactacaccctgccgctggcaggcgagtttccggtaagcagtgcagtggtgctctgttttcgcacgcagatttttgtcacccgtagcgatgtggtgctggtgtccggtattcatcgtggcgaaccggaaatcgtcggtcgttatgacagtcttggaaactctctgggggcgtaatggcgcgatttgtggtgttagtgattgatagctttggcgtaggggcaatgaaagatgtcacgctggtgcgtccgcaagatgcgggagcgaatacatgtggtcacatcctgagccagttgccgcatttgcagctaccaacgctggagacgctggggctaatcaacgcattgggttatgcgccaggcgatatgcagccgtcagattccgcaacctggggcgtggcagagctgcaacatgaaggtggcgatacctttatggggcatcaggaaattttaggcacgcgcccgttaccgccgctgcggatgccttttcgcgatgtgattgaccgtgttgagcaggcattagtttccgctggctggcaggtggagcgccgtggcgatgatctgcaatttctgtgggtcaatcaggcggttgcgattggcgataatctcgaggcggatttaggccaggtctataacattaccgccaatctctctgtgatctcttttgacgacgcaatcaaaattggtcgtatcgtgcgtgagcaggtacaggtcggtcgggtcattacatttggtggcctgttaaccgacagtcaacgcattctcgatgccgcagaaagcaaagaagggcgctttattggtatcaatgcgccgcgttctggcgcttatgacaacggtttccaggtcgtgcatatgggctatggcgtcgatgaaaaagtgcaggtgccacaaaaactgtatgaagcaggcgtgccaaccgtgctggtgggtaaggtggcagatatcgtcaacaatccttatggcgtgagctggcaaaatctggtggatagccagcggattatggatatcaccctcaacgaatttaacacccatccgacggcgtttatttgcaccaacattcaggaaaccgacctcgctggtcatgcagaagacgtcgcacgttatgccgaacgtttgcaggtcgttgaccgtaaccttgcccggcttgttgaggcgatgcagccagatgattgcctggtcgtgatggcggatcacggcaacgatccgaccattggtcacagccaccatacccgcgaagtggtgccagtgctggtttatcagcaagggatgatcgctacgcagctcggtgtgcgcaccacgctttctgatgtgggggctaccgtgtgtgaatttttccgcgcgccaccgccacaaaatggtcgctcttttctttcctccctccggtttgcaggagacaccctatgagttttgatccgacgggttacaccctcgcccatgagcatctgcatattgatctctccggctttaaaaacaacgtggactgccgccttgatcagtatgcgttcatttgccaggagatgaacgacctgatgacccggggcgtgcgtaatgtgattgagatgaccaaccgttacatggggcgcaatgcgcaatttatgcttgatgtaatgcgcgagacggggatcaacgtggtggcctgtaccggttattaccaggacgcgtttttcccggaacatgtggcgacccgcagcgtgcaggaactggcgcaggagatggtcgatgaaattgaacagggtatcgatggcacggagctgaaagccgggatcatcgcggagatcggcaccagcgaaggaaagattacgccgctggaagagaaggtatttattgccgctgcgctggcgcataaccagaccggacgcccgatctccacgcatacgtcgttcagcacgatggggctggagcaactggcgttgctacaagcccacggggttgatctttcgcgcgtcaccgttggtcactgcgatctgaaagacaacctcgacaacattttgaagatgatcgatctcggcgcgtacgtgcagttcgacaccatcggcaagaacagttactacccggacgaaaagcgtattgcgatgcttcatgcgctacgcgaccgtgggttgctgaaccgcgtcatgctgtcgatggatattacgcgccgctcccatttaaaagccaacggtggttatggctatgactatttactaaccacctttattccgcaattgcgccagtcaggattcagtcaggccgatgtggatgtgatgttacgtgaaaatccctctcaatttttccaataaggacagactcatgaaaaagattggcgttgcaggcttacagcgtgagcagattaaaaaaactattgaagcgacggctcctggctgttttgaagttttcattcacaacgacatggaagcggcaatgaaggtgaaatccgggcaactggattattacatcggcgcgtgtaataccggtgcgggcgcggcattgtcgattgccatcgcggtgataggctataacaaaagttgcaccattgccaaaccaggcattaaagcgaaagacgagcatatcgccaaaatgatcgctgaaggaaaagtggcgtttggcctttccgttgagcacgtcgaacacgcgattccgatgctgattaaccatctgaaataaaaggcacgactatggatctgtatattcagattatcgtggtggcgtgcctgacgggtatgacatcgcttctggcgcatcgctcggcggctgtttttcatgacggcatccgcccgatcctgccgcaactgattgaaggctatatgaaccgtcgcgaggcggggagtatcgcttttggtctgagcattggttttgtggcctcggtggggatctcttttaccctgaaaaccgggctgctcaacgcatggttactctttcttcctaccgatatcctcggcgtcctggcgataaacagcctgatggcgtttggtcttggcgctatctggggcgtgttgatccttacttgcctgttgccagtaaaccagctgctgaccgcgctgccggtggatgtattaggtagcctgggggaattaagctcgccggtggtttcagcttttgcactgttcccgctggtggcgattttctaccagtttggctggaagcaaagtctgatcgccgccgtggtggtactgatgacccgtgtggtagtcgtgcgctatttcccacatcttaaccctgaatccatcgaaatctttattggcatggtgatgctgctggggatcgcgataactcacgacctgcgtcatcgtgatgaaaatgacattgatgccagcgggctttcggtgtttgaagaacgcacgtcacggattatcaaaaacttaccctatatcgccatcgtgggagcattgattgccgccgttgccagcatgaagatttttgctggcagtgaagtgtcgatcttcacactggagaaagcatattccgcaggcgtaacgccggaacaatcgcaaacgctgattaatcaggcggctctggcagaatttatgcgcggactggggtttgtgccgttgattgccaccaccgcgttagcaacgggtgtgtatgcagttgcgggctttacctttgtttatgcggtggactatctctcgccgaatccgatggttgcagcggtattaggcgcagtggttatttcggcggaagtcttgctgcttcgttcgatcggcaaatggctgggacgctacccgtcggtgcgtaatgcgtcggataacatccgtaacgccatgaatatgctgatggaagtggcgctgctggtcggttcgattttcgcagcaattaagatggcgggttataccggattctctatcgcggttgccatttacttcctcaacgaatccctgggccgtccggtacagaaaatggcggcaccggtcgtggcagtaatgatcaccggtattctgctgaatgttctttactggcttggcctgttcgttccggcttaaggaaggcacctatgaagacgtttcctctgcaaagcctgacgattattgaggcgcagcaaaagcagtttgcgctggtggatagcatttgtcgccatttccccggcagcgagtttcttactggcggtgatttaggcttaacgccaggactgaatcaaccgcgcgttacccagcgtgtggaacaggtgctggctgatgcatttcacgcacaggctgcggcgctggtgcagggcgcggggactggcgcgattcgcgccgggctggcggctttgctcaaaccggggcagcgtcttctggtgcatgacgcgcctgtttacccgacgacacgggttattattgagcagatggggctgacgcttattactgttgatttcaatgacctgtcggcactgaagcaggtcgtcgacgagcaacaaccggatgcggcgctggtgcagcatacgcgccagcagccgcaggacagctacgtgctggcagatgtgctggcaacgttgcgcgcggcaggtgttccagcgttaaccgatgacaactatgcggtgatgaaggtggctcgaatcggctgtgaatgcggcgcgaatgtctcgacattttcctgcttcaagctatttgggccagagggtgttggtgcagtggtcggcgatgctgatgttatcaaccgtattcgcgccacgctttactccggcggtagccagatccagggcgcacaggcgctggaagtattgcgtggtctggtgtttgcgccagtgatgcacgcggtgcaggcaggggtatctgaacggttgctggctttgcttaacggtggtgcggtgccggaagtgaaaagcgcggtgattgctaatgcgcagtcgaaggtgttgattgtcgagtttcatcagccgattgccgccagagtgctggaagaggcgcaaaagcgcggtgccttgccttacccggtgggtgcagagtcgaaatatgaaatcccgccgctcttttatcgcctttccggaacgtttcgccaggcgaatccacaatcagaacattgtgcgattcgcattaacccgaatcgcagcggtgaagagacggtgctgcggattttgcgtgagagtattgccagtatttaatgctggatagcaccgtcaagctaaattccgtactgaacggtcccctcgcccctttggggagagggttagggtgaggggaacgtacgggatgtaaaattcaacgcgccagcatcgccggatgcgatgctggcgcatcttatccggcctacggttaatgtcttttattatcaatagttaaggtgatgcgattggcgcggcagaagagttcggagacgtgcaccggtttgtcattctgatcaaaggcgattttgctgatgcgaaacaacggttcgcccagttcgcatttcagccattttgcctgcgggcgggtggcggcaaagatatcgatggtctttttgtcgctgaccactcgcgtgtcaaaacgctcctgaaataactgataggtggagcttccttcgacgtaaatctcatcaaagtcaggataacgcgacagcgggatccatgaactatcaataaacagcggctctttatcgagatacatcacccggcagagatggaacacttcgctgtttccggggatgttcagcttttcgcaaaacggcgcggcgctgacccgttcctgttcgatcactttctctttcgtcgccttgccttgtgagacgccaaaatcggtaaaaccactgacagtaagcagggcgttttcaactttctggctttgtacaaaggtgccttttccctgccagcggatcagtacgccgtctgccactaagtcgctgatggctttgcgaatggtaatgcggctgacgttatattgtgtacaaagctcgttttcggtagggatctgttgcccggcctggtaaaccccctgcgcgatatcatccagcagtcgctggcggacggtagcgtagaggagttgatgagagtagcggtccgtagctgacataatcgaccctgaaataaagaatgaattactcggattatagggtcgttttccggcaagtaacagcacgttggcgtgaagatgctcacgccaacgttatacctaccaggcaccgtggtactgaatggttttcgccgcgcacgccgttccctgcgctatcgcctgcggtaatgtcatccccgcagaccagccgcaaaggaatccggcaatgaacgaatctccggcacccatggtgtcgataaccgtcaccggttcaggagcctgacgccagaactgcgcgccatcccaggcaatgctgccgttttcacccagcgtgacaatcactgttcctgcgccacgggcaacaatcgctttcatcttcagacgcagcgtttcgtcttcttgcggtgcggaggcaaaggcaaaatcgagatgcggcaccagtgtctgccagagcgggctgtcccacttgtcggagaagtcgaaagcggtaagtttgcccgcagcgtgcagctgtgggaatgcgtcttccgcatgtccccagattgccgcgtgcacaatgtcatactgcgccagccaggcgtaatcctcttcactcagggcaaagtcggccatcacgccttcggtgtagtcgccaaaaacgcgatcattgtcgtgcagttccacctgagtttgtgcggtaacgccgtgtttcgtatggacatggctgatatcgacgcccatgcgggcgagatcctgcttcagctttgtgccgtagtcatcgtcacccacccaggtaatgcatcccggctgtatgccgtagcgagtgcagtacaccgccacattgaccgcattaccgccagaaaacgctttattcagttgcgggtagatatcgacgcagttatcgccgattgtcgccagggttttcatctctcatcctccggcagcagcgcgcgaaagcgttccagcgcctggcgggcatagagtctgggctcgttcatatacatcgtcaccagctccaccgtacagtaaccctcatagccccgctcaataatatcgcgcatcagttcccgcagcggcattttgccttctccaggaatgtaatgcgtgtcgctggccccgtcgctgtcgacaatatgcagatgacgtaatttatcgcccagtttgtcgaaataactcatcaccggttccgcctggacatacggcgcgcaaatgtcgaccatgctgaacaggcgcggcgaaggcaccagcgccagcgcatgaagcacatcattagcattacacacgacgttcgattcatacggcgttaacggttcgaggattagatccatgccgatgttttccgcgtactcacacagttcgcttaggttctctgccagccgtccccagataacattaggtggcgtgagatagcccgcgtgggccgcggaaatcagcgtataacccgcgttcatctcttttgccatatccatcgccagcttgatcatgtcgaggctttcgcgacgcatatgttcatcgcccagcatcatgttatacggatagccgttggtttctggcgtatagccgataatcggcatctgatacgtctgcgccagcgccttgatttgtttgatgccgcccgcttttaagtccggcgcgaacgcgtgcgggcgaccgccccaaatttcgatgccgtcgtaacccagctcgcttgcatcacgaaatgcgtgttcaataggcagccgctggtggccgcaggtaaacatacctgttttcatcgggtaactccttgcgtaaatccggcccgttgccgggccgggagagggattaatattccaccagaccaccgtaatagcggcgttcatccgggttgtgatctttgtaaatagacaggtagtagcagagccactccattggcacgaacatcaggaacggtgccagccacgggtgcagcccttgcgaaatttcggcgtaatcgatgacgatcacgttgtcagtacgctgtttaacaaagttaatggcgcgttcggtggtgtggcgactttcatcattgccgagcaggaacaggaacggaacgcccggttcgacaatctccagcgggccatggcggaactctccgctctcaatcacgcagccgtgcgtccaggtaaattccatcagcgttacaatgccttctttgtaacccagcggacgcagcggacccgcagcaacggtataaatcatcggccactggctggccagttcaccaagctggcggcctttttcttcccaggtgcgtaccagatgaccgagcgcattcggcaactgcttgagatcgtttttgatcttgccgatttccgcgttcggcgcgaggcgggtgatcatctccagcaccacgctgtagcagagcagcaggtgaatttcccagatacagtcggcctgataatcaatgctaaattccgccgccgaggtaatcgggctatccgcgcgtttggtgaacgccgcagtgagtgcgccgcaggcccggcccagctccagcgctttgattacctcttcggttttaccgtagtcagaaacgccaattactgcgcaacgatcgtcgaggcgatacggggtgttatcgcagaactcccagccggaaatggcgtagacctgaagatcggaaaagcgatccgccagatgtttcgccgtttgcgccgcgttgagtggcgatccgcaggcaacgaaataaatacgatcaatgtcgcgcttcaccatctcttccacgatggcgtgcaccagcggaacgtcatggctgagaactttttccacttcctgaaccatattttcggtgaccagaaagtccacggtgcttttatcaatatccaacattttattttctccagataacattacgacaaagcgttgagctggcggctacgcttcgcccagaaggcgtaagcaggcagaccagtagcaataacgatgacggcgcagataaggccgggaatcggtgcccagacaaaggttgaggcgaccagaatgaggcttgacgcaatggcgagggtggtcatcagcccgaaagccggagtacgccacagcggtttgtaatcgtcgcgtttacgacaccagatgatggagccgaaggtgagggtatttttgaaacacatcaccagggtgaaataacccagcaggctggtgagatcggaaacgaagatgaagaagatccccagcgccccttgcaggatgatggagacatccggcgtgttgtatttcggatgcacatggccgaagcatttaaagaacaggttgtctttcgccatcgcgtattccagccgcggctggtacatcacgcagctggaaagcgaaccaagaatgacgatcatcgccgtgatggcaacaaagatcccagcggtgctgccgagtgcggggatccaggtcagggcgtcggaaatcggcgtttcagaattggcgagtttgtcgaagggcatcaggccggaaatcaccagcgccagcagggtgtagagcaccagaaccagcagacaggaaccaatcagcgctcgtggcatggtttttccggggtttttaatttcgccggtcatataacagatagaggccatgccggtatacgaccaactggtggcagagatccccgccagcagcgccataaagctgcccgttgcgccaatcgcagtggtggtaggggcggcaaaattctccgctttaaaccagaagatcccaaggccaatgacgatagtgaacgggataattttggcgatggtaattagcgtctgaaacgctgcgccgccttcaacggagcgcaggtgtagcaacataaaggcgataattaatccggcggcgataaatttaccgagcaacggatcgataggcgttaaaaagccaagattgctgacaatcgccagcgccataatcgacaatgacggcgcatcgttggcccagaagctggcccagccggagaggaaagccagcggtcggcttccggcatttttcagataaacataatctgcgccattttccggataagcggtggatagttccgcatagacgcacatttgcgggatcacaattaacccgccaatgacaaacgcgagcaccgtaagccacggcgtgcccgctgcttttgccacttcacccacagatacaaaaataccggagccgacggttgtcccgacggcgattgcaagaacggcccaaaatccgagcttgcgttggagttcctggcttcccatagcgatacctttttcttgtccaatacgttgtaggggagagtttgcagtcatttaaaaggtaacatgacaatgcatgatgaatataacaacatatgatgttatgtaatgtggaggaagatcacaaaatttcgcacaggatcgcgctgtggctaatggatgtagttatcaaattgaatttaaagtgaaaatatttttacgggcgggggcaagaaggacatagaaacaaatacgccctcggaaaatccagagggcgtcgggcaattaaaccggtgttagccgatttctgtcagagacttactgtgcagtaggaccgcaaccgccaatgattttagaaatagaaattgccgggtgcagcaggtagtcgtaagagcagttcttatcacggttttcaatatgaccagtacatgcagttaacgtagccagtactgcacctaccagtgcaactttaataaatttgttcatttacattccctatgtattatatattaattaatattcattgattatatgaatataagcagactgctcgttaagaacgatacaggaatatttaattggcgtcagtgagcgaatgacttaattttgtaagtcgctgtaacggtgaatataacccattagcagataatatttattaaggggctatgttttatttgctgaatatataaaaagagtcattaagaaggccagaattctctggcccgggttaaattaatggttggagaaccagttcagtttatcgcgcaggccaacaacccgaccaataataattagcgatggactgttcatttgctgcgccagttctcccagctgtgtgagcgtaccgtcaatcacgcgctgcgtgactgccgtaccgttttcgacaattgccaccggcatttcgcctggcattccgtgttcaatcagcttttgctgaatagtcgcggcctgattcaaccccatatagaacaccagcgtctgtttttctgccgccaggttttcccagtccagctcgccaccggtttttaagtgtccggtaattaagcgtacgctctgggcataatcgcgatgcgtgagtggaatacccgaataggcagagcaaccagaagctgcggtaatacccggaaccaccgagaacggaatacccgcgttgcacagtgtttccagctcttcgccaccacggccaaaaataaacggatcgccacctttcagccgcaccacgcgtttgcctttttgcgcttcccgcagcaggatctggttaatctcttcctggggtacgcagtggtatcccgcgcgtttgccgacgaaaacacggtccgcatcgcggcgtaccagattcataatatcgtcagaaaccagacggtcgtagaccaccacatctgcctgctgaatttgttgcagtcctttcagtgtcagcagcccggcatcgcccggacctgcaccaaccagcaccacttcaccgcgatggtcgagcggttcgttgattaactgttcggtcgtttcagtaatggctttctgatcgttgtttgccagcgactgcgccaggcggtcgttaacgaacaatttctcccagaaacggcgacgctcacccatcgtggcgaactgttgtttcactcgcccgcgtaattgcccggcgtatttcgctacctggcccagatgtaacggcagcagtgattcaagtttttcgcgcaacaggcgtgccagaaccggagaggtgccgccagaggagaccgctaccatgagcggtgagcggtcaataatcgacggcataataaagctggcggctttcggcgcatcgaccacgttacagaagatgcgacgagcttcagcggcttcgctgacgcgctggttaagcgcgtcatcatccgtcgctgcaatcgccagccagcaggtgtcgagaaggctttcatcaaatggcccttcgacgagggttaacatgcctgcatctgcccatgcggtgaactgtggaataaacgctaatgcattcaccgttaagcgagcgcctgcgtctaacagcaaccttgctttgcgttccgcgacatcaccaccgccgacaatcagacagtcgcgatcgcgtaattggcaaaatataggcaaatgatccacgtaaaaaccccttagtaattaaccggcagccgtttcagtttgattaaatttgtccgcaaccggacgattcgctttcggcgtagcataccaataacccaatcccatgaatacggcacctgataaagtattacccagcgtcacccacagcaggttatgaccaatacccgccagcgtgtaggcttcgctgtggttgccgaaccaggagagcgcgaacagcgtcatgttagcgatagagtgctcgtagccggacgcgataaatgccagcagacaccaccagatagcgataaatttcgccgccccttcagtgcgcagcgccatccagattgccaggcaaaccagccagttacacaatgcacctttgaagaagagtaccattgccggtgcagtggttttagccagcgcgacggagtgaacgatgctggtatctaccggcagcaggctaccgccgccccagctatagagcatggcaacgaagacggaaccgaccaggttacccagccaggtttgcggcaggattgcccacatttgcccgtggctgatgctgcccgcttttaccccaaaggtgaggaacatggtgtgtccggtgaacagttcagaaccggcgataatcaccagcgttaaggcgataccaaaggtcgcgcccatcaccaaagggcgtacggatggatcgagcaaattaccgagcgtgaaaatcaggatgatcccaagacccacatacgcgcccgccatggcggagctgacccaaaagccgagcgggttatttgccgacaggcgtgcaatgcgcgcagcgttagccgcacacttattaatagtgtctgtaaacatttgattatcctttaaaaaataaaaacaaaaaataaaacaaaaagtttaaaaaatgtcctgcaatataccgaagattattacaggaccatgcaaaaaggggaggcattgcgcctcccgttaaaacattaaccgcgcagctgcaccacgccgtctttcactcgcgcttcgtaatgtttgacggaaaactgttcgtcttccatgcacaagccgtcgcttaagcgaaaacgctgttttttcagcgggctggcgacccacagctcgccctggtgttccgcaatcagtccgcgtgacagcacgctggactcgaagaacgggtcgatgttgctgatcgcaaacacctgatcgctgtgatacgggcggaaaatcgcgacctgctcgtcacctaacagcgcgcagacgccggtttcaggcaggatgtcatcgattttgcagatgtctttccactggctcatgcgttgtcctccaccagagttactgggatacgttcatacggcgttgccggacggtgctgttcgcgctctggcaccatctgcacgttcgggtcacgcttgtcgctgttgatgaagtgtttgaagcgagtctgcgcagacggcgtattgaccgtttcagtccactcacacagtaccgcttcacgcaggcgcgccatctcttcttccagatgtgcgttcagccccagtttgtcgtcaatgatcactgctttcaggtaatcgatgccgccttcgaggttttctaaccacggtgcggtacgcgtcagtttgtcggcagtacggatgtagaacatcatgaagcggtcgagatatttgatcagcgtttcgcgatcgatatccgccgccagcagatccgcatgacgcggtttcatgccgccgttaccgcaaacatacaggttccagcctttttcagtggcgataatacccacgtctttaccctgagcttctgaacattcacgggtacagccggagacaccgaacttcattttgtgcggcgtacggatgcctttgtagcggttttccagttccacgccgaggccgacgctgtcgccaacgccgtagcggcaccaggtgctacccacgcaggttttcgccatacgcagtgctttcgcataggcatgaccggtttcgaagccggcttcaatcagctgacgccagatctccggcagatcgtctttctgtgcgccaaacatcgccagacgctgggagccagtgatcttggtgtagagattaaattcacgcgcgatacgacctaccgccatcagcccttccggggtgatttcaccgcccggagaacgcgggatcaccgagtaggtgccgtctttctggatgttagcgaggaagttgtcgttagaatcctgcagcggagtatgttccggcttcagaatgtattcgttccagcaggaggccagcagcgaaccgacggttggtttacaaacttcacaaccgtagcctttgccgtgtttcgccagcagttcttcgaaggttttaatgccttcaacgcggatcaaatggaacagttcctgacgcgaataagcaaagtgttcgcacaggttgttgttaacttcgatgccctgtttcgccagttccgcgttcagtacctgagtgaccagcgggatacagccaccgcagccagtacccgctttggtttcagctttcagcgccgcaactgtgtggcagcctttgttgatggcagcaatcagatcacctttggtgacgtcgaagcaggagcagatttgcgcgctgtccggcagtttatcaacaccgatagacggcttgccgctacccgagtgtgctggcaggatcagggaatccgggttttccggcagttcgatagcgttcagcaccagttgcagcaggttaccgtagtcgctggtatcgcccaccagtaccgcaccgagcagggttttgttgtcttcgctgacaatcaggcgtttgtagatctctttactttcgtcgaggtaaacgtagctacgtgcgccaggcgtgcgaccgtgcgcatcaccaataccgcctacgtctacgcccagcagtttcagcttggcgctaaggtcagcaccttcaaaggcgttttcgctaccgagaatatggtcaacggcgacctgcgccattttgtagccaggtgctaccagaccaaatacacggttgttccagcttgcgcattcaccgatggcgtagatatccggatcggaagtctggcaggaatcattaatgacaatacccccacgcggagcaacgtccagaccacactgggttgccagcttatcgcgcggacggataccggtagagaagacgataaagtcgacttccagttcgctgccgtcggcaaaacgcatggttttacgcgcttcaacaccttcctgcacaatctcaagggtgtttttgctggtgtgaacgcgcacgcccatactttcgattttgcgacgcagctgctcgccgcccatctgatcaagctgttctgccatcagcataggggcaaattcgataacgtgggtttcaatacctaagtttttcagcgcgcctgcggcttccagacctaacaggccgccaccaacaacggcaccgcgtttgctgcgacgggcgcaggattcaatggcgttgaggtcttcaatagtgcgatagacaaagcagtcctgagtatcagaacctttgattggcgggatccacgggtaggaaccggttgccatgatcagcttgtcataaaaaacggtacgtccggcgctggagtgaatcaccttctcctgacggttgatggtgatagcgcgttcgccgaccagaactttgatgccgtgtttctcgtagaagccttcgcgcaccagcgacagctcttcggcggtgtggtgagagaagtaagacgagaggtgtacgcggtcataagcgatgcgcggttcttcacagaaaacggtaatatcaaagttggccgcatcagatttatcaagaagatcttcgataaagcgatggccgaccataccgttaccgataattgcgagtctgactttgctcatttttgcctcgatttcttttctattaccgcctaccttaacgattcagcaaccccgcttattgatgtaaatcaaattcacctttatatactccttaatgggtatattgctgatttgtataaattttcttaagtcacggaattgtctgatatttcatgtttgtgcaaaaaatagacaaaatgagcgggtttatagaaatagatgcacgtagcgggggaagagaggaaaaggccggacgacgatagtgccgtccggcatgagcaattaatgagaggtcagggtgttatgctgacggtgacggctgacgaaacctaacaggaagcacatcacaaagacgacagcgtacagaccgtttgctgtaagcagtgccgcctgcggaccgctatgttcaacgatcgggccggtaaccacaaaggtcaacatagtaccgatggttccgcaggtcaggacaaagttaaccagttttggcgacggtactttggtctgctgtgaacccagggtgatgatggtggtatagatcgcgctggagaagaagcccagagcgagaattgaccacgccatatgtgctggtgttccggtgttaaagacgtacatcagaatcgcagccagaccagccagtacggtcagaatgcgttgcaaatcaaagaagcgaagaataaagctgaacgcccacatgccgaccatgtatgacatccagaagttactcaccagcgtgcccgcgtcgttcaggctcatgcccaggcctttggcatactcaggcacccaggagataaaacctaactgaccgaggatgtagcacaacgccgcaacagagagaaacagtacgccgatcccccacttttctttctctaccggagcatccgtttttggcgcatgtttgcccagcgccgggaactcacagccgaaggtcagaataaaaatagcgacatacaccagcccgatgcaggcataaacccagtaccactcaatgctgcgcgccagtagaaacgcggcgatcattgggaaaatcatcccagccatactgaagaaggagtcggtaaataacaggcgggaaccgcgctgacgcccttcatacatttgtgttaccaggaatgtaccaatcgacatggtgatgccgctgaccaccccgagaatgaacatcgccgccgagaacagcgccaggctgtggctgaacatcaaaccggcaaccgccagcaccatcaggagaaagccaaaacgtaactgcgttttcaacgggacgatttccatcagccaggcgttgaggaagatagagattaaaatgccggcgttgaggaaggtgaaggtattactcatactggaaacaggcagattgaaataatcggcgatatttcccatcaccatcccggtgacaataaccaacgcaccagtcagtgcgtaggagagaaagctaatccatgtgagcttgatgcgattgctgttagtcatgattggcctgcgttcaaaaataaaatggcatagcgggatatgccgcgagcgggcgattttaggtgattttgtgatctgtttaaatgttttattgcaatcggttgctaaattgcattttaagaggtgattttgatcacggaataaaaagtgatcgtcaggttacatatatttcagatacgtaaaattaggtaaagggatggccttgttcttgaaggctatttagaatctcttcacttgctttttttctgctctgtttgttaaggaaatctcatgttcaaatcgaccctggcggcgatggctgctgttttcgctctttctgctctttctcccgcagcaatggcagcgaaaggggacccgcacgtattgttgacaacctcagctggtaacatcgaactggagctggataaacaaaaagcgccagtgtctgtgcaaaactttgtcgattatgtgaacagcggtttttataacaacactacctttcaccgcgtcattcctggctttatgattcagggcggcggtttcaccgagcagatgcagcagaaaaaaccaaacccgccaatcaaaaatgaagccgataacggcctgcgcaacacgcgtggcaccatcgcgatggcacgtaccgctgacaaagacagcgccaccagccagttctttatcaacgttgccgataacgccttccttgaccatggtcagcgtgatttcggttacgcggtatttggtaaagtggtgaaaggcatggacgttgccgataagatttcccaggtgccgactcatgacgttggtccgtaccagaatgtgccgtcaaaaccggtagttatcctttccgctaaagtcctgccgtaatgatttctcgcgcgggcaatcttgcccgcgcttctgctctcccggcgtaacccggatttgccgcttatacttgtggcaaatggacacgttcagggaggcatcaagtgaagaaactcaccgataagcaaaagtcccgtctctgggagcttcagcgtaatcgtaattttcaggccagtcgccgtcttgaaggcgtcgagatgcctttagtcactcttactgccgcagaggctttagcgcgccttgaagagctgaggagtcactatgagcgataaattcggcgaagggcgcgatccgtatctttatccaggccttgatatcatgcgtaaccggctgaacatccgccagcagcagcggctggaacaggccgcttacgaaatgacggcgctgcgtgctgcgaccattgagcttggtccgctggtgcgcggtttaccgcatttgcgaactatccatcgccagctgtatcaggatattttcgactgggcagggcaactgcgtgaagttgatatttatcagggtgatacgccgttctgccactttgcttatatcgaaaaagagggcaatgccctgatgcaggatctggaggaagaaggttatctggttggcctggagaaagcgaagttcgtcgagcggctggcgcattactattgtgaaatcaacgtgctgcatcccttccgggtgggaagtggtctggcacagcggatcttcttcgagcaactggcgattcatgccggatatcaactgagctggcagggtatcgaaaaagaggcctggaatcaggcaaatcagagtggggcaatgggggatctcaccgcactgcagatgatatttagcaaagtggtaagcgaagccggggaatctgagtaaaatagcgcggttcttttgtaccggagccgccatgatcctgcttatagataactacgattcttttacctggaacctctaccagtacttttgtgaactgggggcggatgtgctggttaagcgcaacgatgcgttgacgctggcggatatcgacgcccttaaaccacaaaaaattgtcatctcacctggcccctgtacgccagatgaagccgggatctcccttgacgttattcgccactatgccgggcgcttgccgattcttggcgtctgcctcggtcatcaggcaatggcgcaggcatttggcggtaaagttgtgcgcgccgcaaaggtcatgcacggcaaaacctcgccgattacacataacggtgagggcgtatttcgggggctggcaaatccacttaccgtgacacgctaccattcgctggtggtggaacctgactcattaccagcgtgctttgacgtgacggcctggagcgaaacccgagagattatggggattcgccatcgccagtgggatctggaaggtgtgcagttccatccagaaagtattcttagcgaacaaggacatcaactgctggctaatttcctgcatcgctgatttctgattgccatttagtgattttttatgcatattttgtggttataatttcacatttgtttatgcgtaacagggtgatcatgagatggcaattgaacaaacagcaattacacgcgcgactttcgatgaagtgatcctgccgatttatgctccggcagagtttattccggtaaaaggtcagggcagccgaatctgggatcagcaaggcaaggagtatgtcgatttcgcgggtggcattgcagttacggcgttgggccattgccatcctgcgctggtgaacgcgttaaaaacccagggcgaaactctgtggcatatcagtaacgttttcaccaatgaaccggcgctgcgtcttgggcgtaaactgattgaggcaacgtttgccgaacgcgtggtgtttatgaactccggcacggaagctaacgaaaccgcctttaaactggcacgccattacgcctgtgtgcgtcatagcccgttcaaaaccaaaattattgccttccataacgcttttcatggtcgctcgctgtttaccgtttcggtgggtgggcagccaaaatattccgacggctttgggccgaaaccggcagacatcatccacgttccctttaacgatctccatgcagtgaaagcggtgatggatgatcacacctgtgcggtggtggttgagccgatccagggcgagggcggtgtgacggcagcgacgccagagtttttgcagggcttgcgcgagctgtgcgatcaacatcaggcattattggtgtttgatgaagtgcagtgcgggatggggcggaccggcgatttgtttgcttacatgcactacggcgttacgccggatattctgacctctgcgaaagcgttaggcggcggcttcccgattagcgccatgctgaccacggcggaaattgcttctgcgtttcatcctggttctcacggttccacctacggcggtaatcctctggcctgtgcagtagcgggggcggcgtttgatatcatcaatacccctgaagtgctggaaggcattcaggcgaaacgccagcgttttgttgaccatctgcagaagatcgatcagcagtacgatgtatttagcgatattcgcggtatggggctgttgattggcgcagagctgaaaccacagtacaaaggtcgggcgcgtgatttcctgtatgcgggcgcagaggctggcgtaatggtgctgaatgccggaccggatgtgatgcgttttgcaccgtcgctggtggtggaagatgcggatatcgatgaagggatgcaacgtttcgcccacgcggtggcgaaggtggttggggcgtaaatacgaagcatcaggcaaaagatgtcggatgcggcgtgaatgccttatccgatggtttagcctgcattacgccttcgaatcccgcaacttgcgactcagccaaatcccgtgatgcggtcgctgacgccatgccatcgacgaaatggtgtgcatggtgttcagatgaccaataacccgctgtaaatgctgctccagcgtacctgccgcgccttcgtgcggctgcatctccggcgcatccatgatattggcatcgccagaactacccggttcgtcatactccagtcgctgctgacaacgctgaatggcgatttcacaagactgtaaatactcttgtgccagttcaggtggcaatgcccggtgttcccgcgccagcgtggtcatggcattaatatgctcaacaataaactggctgtgcgttacccacagtttcatatctgccagataatggctgttaaacgccggttcctgcatcgcctgattcaatgagttatacagagtgttatgtgcctgatttacccgcattcgctgccaggccagtggcgtaggttgcggatcctcgctaagaatcaagcgaatcgcttcctgataggcttctaaagcatcatgggcgtttttacgcaataacccgctctgccactgcggccacagccagacagtaccgccgaaagcaattaaacaaccaataatggtatcgataagacgcggaaggatgtattgctcgccgttcaaccacaatagttgcagggtatacactgcggtaatagtaaaaccgaccgtcgcccagccgtagtttttgcgcaatatcaggtagctggcgagggtggtaatcagcatcaacgtcagggtgtaaccttcgggaattttaaagtgcagcgccacgcccgcaatgattaacccgaccacggttcccacggagcgattcacaatcctcagacgggttgcgccatagccattttgtgtcaccagcaataccgtcatcaggatccagtacgacttcggcagatgcagcgcggtgcccatcaggctggcaacgcttaacatcacactgagtcgtccggcattgcgtagcgccggagactttagtgacagataacttttcagcgccggaagtaatggcattcgccgctgtttatcggccagtaagtcacgggcatagagcggtttttgggtgcgcagcacgcgggcgatgcggctgaaatgccagtagcagaattgcccaaccggattatccggatgctggcgggcgattttttccagtgcgccaatttgcttttccatcgtaaaacgcgttggcaggcgatggtaaagaatgtcatcagccagcacgcgcaggcgagcggcgacggtttgcgcattccagcggataacttcttccgcatggctacgctcgaccagcttttgcacctcttccggctgatgcaaactgaccgaaatatgttcctgtaaatccagcgcctcctggaaaatacgcagcatccgcttgtagtcagtattattttgcgcggaaagcatatgcatttgctgatagcactgggtaattagatcgaccgctttttgctggcgcaccagcagcggcggcagcgctttttcagggtcggtgtgctgggtaagcaggctgtatttggcttcacaataatctgccagttcacggtacagcagacttagtgactcgcgcagcggttgttcgcgccagatccagaaccaaaaccagttaaacaatccgtaccagagagtgcccaacgcatagatgagcaacggttcccagaccggcatgtatcccgccaaactgagggtaaaaatggcggcgagcagcgatgcaggaagcaattttgcgtgcaatggccccagctcagcagtgacgccaagtaccagcgttaatccggtcagcaaaaagggcaggggaacatcttttgccagtagtagctgtgtcagcaagctacaggtggcaaacagcgacgcaccaatgattaagcgtttgaaaaaacgtttatgaggcgtatcaaggcccgcaatattgcaacaggcaggaacgagggagaagagcagaccgaatcgtaattcgccaagcattaacccaacggccacgggcaaacatagcaccagcgtttgtcgaagtgcatagttgatatcggggtgataaatcagtctgcgccacatcgggggaaacaaaatggcgcgctaccaggtaacgcgccactccgacgggattaacgagtgccgtaaacgacgatggttttaccgtgtgcggagatcaggttctgatcttccagcatcttcagaatgcgtcccacggtttcacgagaacagccgacaatctgaccaatttcctgacgggtaattttgatttgcataccgtccgggtgagtcatagcgtctggttgttttgccagattcagcagagtctgtgcaatgcggcccgtcacgtcgaggaacgccaggttgcccactttctctgaagtgacttgcagacgacgcgccatctgtgcagacaaacgcatcagaatgtccgggtttacctgaatcaattggcgaaattttttgtacgaaatttcagccacttcacaggcggttttcgcacgtacccatgcgctacgttcctggccctcttcaaacaggcccagttcgccaataaaatcaccctgattcagataggagaggatcatttctttaccctcttcgtctttgatcagcactgccacagagcctttaacgatgtagtacagcgtttccgctttttcaccctggtgaataagcttgctcttggatgggtacttatgaatgtggcaatgagacaagaaccattcgagagtcgggtctgtttgcggtttgccaagcaccatgcgcggttatcctctgttataagctttctccagagccagataacgccgctgtctctggattgccgaaatatgcttcccgctacctgggaaggggctatcaactgtactgcacggtaatgtgacgtcctttgcatacatgcagtacatcaatgtattactgtagcatcctgactgttttagcatagctttcgctttgtgtctcctggtgtctcgcttcagcatgacccaggtcgccttccgttgcgcgatttggttagtacgcgtactctgtcaggaaaattgacgcagtggagtagcaaaaatgcaagcgcgagtgaagtgggtcgaagggttaacttttctgggcgaatccgcctctggtcatcagattttaatggacggcaactcaggcgataaagcaccaagtccgatggaaatggtgttgatggcggcgggtggttgcagtgccatcgatgtggtttcgatcctgcaaaaagggcgtcaggatgtggtcgattgtgaagtaaaattgacctctgaacgccgcgaagaggcaccacgcctgtttacgcacattaatctgcattttatcgtcaccggtcgcgacctgaaagacgcagcggttgcgcgtgcggttgatctctctgccgagaaatattgttcagtggcgttgatgctggaaaaagcggtgaatattactcactcgtatgaagtggttgccgcgtgacttaactatcccgttgtgaagccggatagtattttatccggcgtaatagcagagttactcgattttctttccttccatcaatcgttgcaccagcggcagcataattaattccattgccagacccattttgccgcccggtaccactaacgtattgatgtgggaaatgaatgagccttgcaacatcgccagcagccaggggaaatcgatcccttccagattacgaaaatggatcaccacaaagctttcatcgagcgacgggataccttttgccgcgaacgggtttgaagtgtcgacggtgggaacgcgctggaagttaagatgggtgcgggaaaactgcggtgtgatgtagttgatatagtcttccattgaacgcactactgagtccatcactgcttctcgtgagtgcccgcgctcgctggtgtcgcggatcagtttttgaatccactcaaggttaacgataggcaccacgccgaccagtaagtccacatgctgcgcaacgttatgctgtggcgtgactacgccgccgtgtaaaccttcataaaacagtacatcagtgggttccggtaaaggttgccagggggtgaatgtccccggtacctgattccacggtacggcttcgtcgtaggtatgcagatatttgcgagatttccctttgccgctctgaccgtattcaatgaaggtttgttccagcaggccgaagtcgttagcctcggggccgaagtagctgatatgccgcccggcgtcgcgcgctttgcggatcgccatgtccatttccgggcgggtgtaacggtgaaaactgtcgccttccacctcagctgcatgcagatttaactgcgcgaatattttacgaaacgcgaggctggtggtggtggtccccgcgccgctggatcctgttaccgcaatgaccggatgtttggcagacatagtaactccatgacttagctatcattattatctcgtccgccgacggttgcaggttattcgcgaaactgactgcgcggcataatattgaccgtttcgtgcagctccgaccataccagcaccgcttctccgcactgtagctggcgtttgacgtcggcgactttctgttcaagtgtacgctcatgttcaccataatcggtgccttcacgtaacacaaagctttcaattaaattttccagcgtttcgggggagaggtcttgccacggaatcaacatgatttcgcctccagatacgttgttaaccagtcaggaatgcgtgactccagccacatttgcggatgaagtaatgtaccgccaataaagccaacatgaccgccatgttcagtcagttgatactccacctgcggggggagactttccggtttcgggatcacctgatgatccataaacggatcgtctttggcgtgaataatcagcgtcggtttggcgatccggttcagcatcggcatggcgctacactgacgataatagtcgatagcgtcggcgtagccgtgaattctggcggtgatgagatcgtcaaattcacggatgcgacgtaccgattttaactgcgcgagattaatcggcagcgttccggggtaggctgccagcttgcgcgcggcattggcttttaacaggttcagcaagtaacgctgataaacgcgggaaaagcccttttccatatgatagctacaggcttccagcataaacggcgcagagacaatcaccgccgcatcaaccgggagatcattgccttcctttgccagcaaacaggccagcatattaccgccgagcgaatagccgacggcagccgttggcgcatgaccaaattcgcgttgcagccagcgtaaaaaccaactggcgtcttcggtttcgcccgaatggtaaatgcggtgcatacggtttggttcaccgctgcatccgcgaaaatgcatcaccacgcccagccagccgcgcttttgcgccgcctcaaccagaccgtgggcgtaagggctgttgagactgccttccagcccgtgaaacaccaccagacgaggtttatgttgcgcctgtgcagggttttcactccacgcaagatcgacaaaatcgccgtcgggcaactccagccgctgccagtacggggtgaatttcacctgacgacgaaacagacgcggcagcatggtttgcagatgacaattgctaaagccgcgcatggggatgaattcagcactgctgctgaattcattggcatcggtcgtcgttatctgcgccatcagttgctttggccttccagcagcatctgctcaagctgctcctgggcttccagccatgccatttcgcactcttccaggccggatttggcgctggcttgctgttgcaggcaggcggtcaactccgctttacggctctggtcatacagttcgctgtcgccgagtttctcttccgcctgcgccagttgcgcgttcagcttctccatctctttttccagacgggcaatctctttacgcagtggctgggtttgcgcacgcagctcagcttcccgacgcttctgatctttacgtgcctgggcgctgttcgcattctcttttggcgcttcgtcggtctggttttcctgcttttgtacgtcgctcaaccactgttgataatcttccagatcgccgtcgaacggttcgactttacgatcgtgaaccaggtagagatcgtcagtggtggaacgcagcaaatgacggtcgtgcgaaacgacaaccagcgcgccttcaaactcgattaatgcttcggtgagtgcctgacgcatgtcgaggtcaaggtggttagtcggttcgtcgagcagcagcagattcggccgctgccagacaattaatgccagcaccaggcgggctttttccccaccggagaagcggcgcgtttcttcggttactttatcgccctggaaaccaaagccgccgaggtagtcacgcagtttttgttccagctcctgcggcgctaaacgtgccagatgttgaataggtgattcgtcggcgcgcaggtattcaagttgatgctgggcgaagtagccgagtttgatccctttcgccagaccaatttcaccgctgactggcgcaagttcaccggctaacagtttgattaatgtcgatttacccgcgccattgcggcctaacagaccaatacgcgagccgggcaccaggttcagtttaatcgagtcgagaataatgcgatcgccatagcccgcgctgactttttccatcttcagtaacggatttggcaggctttccggcgcgcggaagctaaagcggaacgggttgtcgacgtgcgcgggggcaattagctccatacgctcgagcatcttaatgcggctctgggcctgcttcgctttggtggctttggcacggaaacggtcgatataactttgcagatgcgctacgcgttcctgctggctttcgtacatcgcttgttgctgcgccagacgggtggcgcgctgtacttcaaacgaactgtagttgccggtgtactcgaacatgctttgttgttcgatatgaataattttatcgacgatcggatcgaggaagtcgcggtcgtgagagatcaggatcagcgtgccctgatagctcttcagccatttttccagccagataacggcatcgagatcgaggtggttagtcggttcgtcgagcagcagcaagtctgaacggcaaatcagcgcctgggcaaggttaagacgcatacgccagcccccggaaaaatcacttaccgggcgctccagttgttcattgctgaaaccgaggccgtgcagcaggctggcagcacgggagcgaatactccatgcgtcaatagcatccagcttgccatgaatggtcgcaatggcgtgcccgtcgttacgttcgttggcgtcgtgtagctgcgcttctagttgacgatattcacggtcgccgtcaatgacatattccagcgccgcttgcggtaacgccggcgtttcctgattcacccacgccagttgccagcttcccggaaaggtgtagctgccgccgtcggcgctgatttcatttttcagcaatgccagcagggtagatttaccacagccgtttttacccaccaggccgactttctgcccagggttgatggtggcggtggcattatccagcaggacgcgcacgccgcgacgaatttgtaacgaggagaaaacaatcataaggtgccgtatgttcagactatgttaacttatcattatgataatgtaatgtatgggcgagctgccgcaccgggcgcaatggtagcccaaaacagcgactatacacaaaaaccataccgggagggggatgatgtctcagccagcgaaagttttgctgctgtatgcccatccggaatctcaggactcggtggcaaaccgggtactgcttaaaccggccacgcagctcagcaatgttaccgtgcacgacctttacgcgcactatcccgatttttttattgatatcccccgtgagcaggcattactgcgcgagcacgaggtgattgtctttcagcatcctctttatacctatagctgcccggcgctactgaaagagtggctggaccgggtattaagtcgtggttttgccagcgggccgggaggaaaccaactggcgggaaagtactggcgtagcgtgattaccaccggcgagccggaaagtgcttaccgttatgacgcgctgaatcgctacccgatgagcgatgtgctgcgcccctttgaactggcggcgggcatgtgccggatgcattggttaagtcccatcattatttactgggcgagacggcaaagcgcacaggagctggcgagccacgccagagcctacggtgactggctggcaaatccgctgtctccaggaggccgctgatggaaggttccgattttttactcgcaggagtgctgtttctcttcgcggcggtggctgcggtgccgctggcatcgcggctgggtattggcgctgtgttgggatatttgctggcagggattgcaattggcccgtgggggctggggtttattagcgacgtcgatgagatcctccacttttcggaactcggcgtggtattcctgatgtttatcatcggccttgagttgaatccctccaaactttggcaactgcggcgttcgatttttggcgtaggcgcggcacaggtgctgttaagcgcggcgttgctggcgggattattgatgctgacggatttcgcctggcaggcggcggtggtcggtggcattggccttgcgatgtcttcaactgcaatggcgttgcaattgatgcgtgagaaagggatgaatcgcagcgaatccggccagctcgggttttcggttctgctgtttcaggatctggcagtaatcccagcactggcgttagtgccgttgttggcggggtcggcagacgaacatttcgactggatgaaggtcggcatgaaggtgctggcgtttgtcggcatgctgattggtgggcgctatttactgcgtccggtattccgctttattgcagcttctggcgtgcgggaagtgttcaccgccgcgacgctgctgctggtgttgggttccgcattgtttatggatgcgctggggctgtcgatggcgctcggtacatttattgcgggcgtgctgctggcggaaagtgaatatcgccatgaactggaaacggctatcgatcccttcaaaggcttgctgctcggtttgttctttatctctgtcggcatgtcactcaacctcggggtgctttatacccatctgttgtgggtagtgataagcgtggttgtgctggtggcggtgaaaattctcgtgctgtatctgctggcgcgattgtatggcgtgcgtagctcagagcggatgcagtttgctggcgtgttgagtcagggtggtgagtttgcctttgtcctcttttctaccgcttcttcacaacgcttattccagggcgaccagatggcgttgttgctggtgacggtgacgctttccatgatgaccacgccgttgctgatgaagctggtggataaatggctatcccgccagtttaacggaccggaagaagaagacgaaaaaccgtgggtcaacgatgataaaccccaggtcattgtcgtgggcttcgggcgttttggtcaggtgattggtcgtttgctgatggcaaataaaatgcgcattaccgtgctggagcgggatatcagcgccgttaacctgatgcgtaaatacggctacaaagtttattacggcgacgccacgcaggtcgatcttttacgttctgcgggtgcagaggccgctgagtctatcgtcattacctgtaacgagccggaagacaccatgaagctggtggaaatatgccaacagcactttccgcatttgcatattcttgcgcgagcgcgcggacgtgtggaagcgcatgagttattacaggcaggggtgacgcagttttcccgtgaaacattctccagtgcgttagagctggggcgcaagacgctggtcacgcttggcatgcatccgcatcaggcacagcgagcgcaactgcattttcgccgcctggatatgcggatgctgcgagagctcatcccaatgcatgccgataccgtacaaatttctcgcgccagggaagcccgacgcgaactggaagagattttccagcgtgaaatgcaacaagaacgacgccagctggacggctgggatgaatttgagtagagggtaaagatggcaatccgaaaacgttttattgcgggcgcaaaatgcccggcctgtcaggcgcaggattcaatggcgatgtggcgcgaaaataatattgatattgttgaatgtgttaagtgcggacatcagatgcgagaagcagacaaagaagcccgcgatcacgttcgcaaagatgagcaagtgatcgggatttttcatccggactagcgatatgcgccgagtttttttaagctagtgagtacacggctgcagaattccgctacaatctgcgccactattcttcccatgctcaggagatatcatgaaagtagcaaaagacctggtggtcagcctggcctatcaggtacgtacagaagacggtgtgttggttgatgagtctccggtgagtgcgccgctggactacctgcatggtcacggttccctgatctctggcctggaaacggcgctggaaggtcatgaagttggcgacaaatttgatgtcgctgttggcgcgaacgacgcttacggtcagtacgacgaaaacctggtgcaacgtgttcctaaagacgtatttatgggcgttgatgaactgcaggtaggtatgcgtttcctggctgaaaccgaccagggtccggtaccggttgaaatcactgcggttgaagacgatcacgtcgtggttgatggtaaccacatgctggccggtcagaacctgaaattcaacgttgaagttgtggcgattcgcgaagcgactgaagaagaactggctcatggtcacgttcacggcgcgcacgatcaccaccacgatcacgaccacgacggttgctgcggcggtcatggccacgatcacggtcatgaacacggtggcgaaggctgctgtggcggtaaaggcaacggcggttgcggttgccactaataccgaaaaagtgacaaaaaagcggggaatccccgctttttttacgcctcaataatgtggcggtggcgtttcttcagcctgcgacgcgatgttcgacggctggctggcttttaacttctcggtcagcagacgcagatgatcgcgcagtttcgccatctccatttcatgagcggtcaccgtgacgttcagttcttcaatggtgatttcctgaaaagccagtcggctctccagctctgccaggcgtgcttccaatgataaatcctgcatgattcacctcttttgtcgaatggtcgccgcggattctacttaactttgctgcccgagacagcactcatttcgcggtcatcgaaactaatttaaacaaaaagagtctgaaaatagatgataatagggcgtgtctgtatgtagatttgttcgacaacgctttatagtacccttctgataatagttaaccctggggtgagatgccccgatcctggagatatggatgaaatcactgtttaaagtaacgctgctggcgaccacaatggccgttgccctgcatgcaccaatcacttttgctgctgaagctgcaaaacctgctacagctgctgacagcaaagcagcgttcaaaaatgacgatcagaaatcagcttatgcactgggtgcctcgctgggtcgttacatggaaaactctctaaaagaacaagaaaaactgggcatcaaactggataaagatcagctgatcgctggtgttcaggatgcatttgctgataagagcaaactctccgaccaagagatcgaacagactctacaagcattcgaagctcgcgtgaagtcttctgctcaggcgaagatggaaaaagacgcggctgataacgaagcaaaaggtaaagagtaccgcgagaaatttgccaaagagaaaggtgtgaaaacctcttcaactggtctggtttatcaggtagtagaagccggtaaaggcgaagcaccgaaagacagcgatactgttgtagtgaactacaaaggtacgctgatcgacggtaaagagttcgacaactcttacacccgtggtgaaccgctttctttccgtctggacggtgttatcccgggttggacagaaggtctgaagaacatcaagaaaggcggtaagatcaaactggttattccaccagaactggcttacggcaaagcgggtgttccggggatcccaccgaattctaccctggtgtttgacgtagagctgctggatgtgaaaccagcgccgaaggctgatgcaaagccggaagctgatgcgaaagccgcagattctgctaaaaaataagcattaagaaccgccgcctgaccaggcggcggtttttttattacaggccggatataattagtgctggaaagcggaacctccgctgtattaatttagttacccgcatcattaatgagcctgccctgaaaagttaacgacaggctcctgaaaaggagtgttttttttcatgtccaggtcgcttttaaccaacgaaaccagtgagttggatttactggatcaacgtcctttcgaccagaccgattttgatattctgaaatcctacgaagcggtggtggacgggttagcgatgcttattggctcccactgtgaaatcgttttgcactctttgcaggatctaaaatgttcagccattcgcattgctaacggtgaacatacaggccggaagattggttcgccaattactgacctggcgctacgtatgctgcacgatatgacgggagcggatagcagcgtttctaaatgctactttactcgcgccaaaagcggcgtattaatgaagtccctgactatcgcgattcgtaaccgcgaacagcgtgtaattggtctgctgtgcatcaatatgaatcttgatgttcccttctcgcagattatgagcacctttgtgccgccagaaaccccggatgtcggttcaagcgtcaactttgcctcttctgttgaagatctggttacccaaacgctggagttcaccatcgaagaagtgaatgccgatcgcaatgtttctaataacgccaaaaatcgtcagatcgtgctgaatctctacgagaaagggatcttcgatattaaagatgcgatcaaccaggttgctgaccgcctgaacatctccaaacacactgtctatctctacatccgccagttcaagagcggtgatttccaggggcaagataagtaatgcgttttgccatcgtggtgaccgggccagcatacggtacgcaacaggcgagtagtgcttttcagtttgcgcaggcgctgatagcagatggccatgagttaagcagcgtctttttctatcgggaaggggtctataacgctaaccaattgacctctccggcaagtgacgaatttgacctcgtacgggcctggcaacaactgaatgcgcaacatggtgtggcgctgaatatctgcgtagcggcagcattacgccgtggcgttgttgatgaaacggaggccggaagactggggctggcttcgtcaaaccttcagcagggatttaccttaagcggacttggggcgctggcggaagcctcgctgacctgtgacagggtggtacagttctgatgaaacgaattgcgtttgttttttctactgcacctcatggtacagccgcaggccgggaaggtttagatgctttactggcaacttccgcattaactgacgatctggctgtcttctttatagctgatggcgtttttcagctgctgccaggacaaaagcccgatgcagtgctggcgcgtgattacattgccacttttaaattgttgggtctgtacgacattgaacagtgctgggtttgtgcggcttcactgcgcgaacgcgggttagatccgcagacaccctttgttgtcgaagccacgccgctcgaagcagatgccttacgccgcgaactcgccaactacgatgttattttgaggttttgaggcgtttatgctgcacacattacatcgctcaccctggctgacggattttgctgcgctgctgcgtctgctcagtgaaggagacgaactgctattattgcaagatggcgtaactgccgcagttgacggtaaccgctaccttgaaagtctgcgtaatgcccccattaaggtctatgccctgaacgaagaccttattgcccgcggtttgactggtcaaatttcgaacgacatcattctcattgactatactgatttcgtcagacttacggttaagcaccccagccagatggcctggtgatggcgggatcgttgtatatttcttgacaccttttcggcatcgccctaaaattcggcgtcctcatattgtgtgaggacgttttattacgtgtttacgaagcaaaagctaaaaccaggagctatttaatggcaacagttaaccagctggtacgcaaaccacgtgctcgcaaagttgcgaaaagcaacgtgcctgcgctggaagcatgcccgcaaaaacgtggcgtatgtactcgtgtatatactaccactcctaaaaaaccgaactccgcgctgcgtaaagtatgccgtgttcgtctgactaacggtttcgaagtgacttcctacatcggtggtgaaggtcacaacctgcaggagcactccgtgatcctgatccgtggcggtcgtgttaaagacctcccgggtgttcgttaccacaccgtacgtggtgcgcttgactgctccggcgttaaagaccgtaagcaggctcgttccaagtatggcgtgaagcgtcctaaggcttaatggttctccgttaagtaaggccaaacgttttaacttaaatgtcaaactaaactcgtagagttttggacaatcctgaattaacaacggagtatttccatgccacgtcgtcgcgtcattggtcagcgtaaaattctgccggatccgaagttcggatcagaactgctggctaaatttgtaaatatcctgatggtagatggtaaaaaatctactgctgaatctatcgtatacagcgcgctggagaccctggctcagcgctctggtaaatctgaactggaagcattcgaagtagctctcgaaaacgtgcgcccgactgtagaagttaagtctcgccgcgttggtggttctacttatcaggtaccagttgaagtccgtccggttcgtcgtaatgctctggcaatgcgttggatcgttgaagctgctcgtaaacgcggtgataaatccatggctctgcgcctggcgaacgaactttctgatgctgcagaaaacaaaggtactgcagttaagaaacgtgaagacgttcaccgtatggccgaagccaacaaggcgttcgcacactaccgttggttatcccttcggagttttagtcaccaggcgggcgcttccagtaagcagcccgctttgggctacttaaattgaacgcctaaaagataaacgaggaaacaaatggctcgtacaacacccatcgcacgctaccgtaacatcggtatcagtgcgcacatcgacgccggtaaaaccactactaccgaacgtattctgttctacaccggtgtaaaccataaaatcggtgaagttcatgacggcgctgcaaccatggactggatggagcaggagcaggaacgtggtattaccatcacttccgctgcgactactgcattctggtctggtatggctaagcagtatgagccgcatcgcatcaacatcatcgacaccccggggcacgttgacttcacaatcgaagtagaacgttccatgcgtgttctcgatggtgcggtaatggtttactgcgcagttggtggtgttcagccgcagtctgaaaccgtatggcgtcaggcaaacaaatataaagttccgcgcattgcgttcgttaacaaaatggaccgcatgggtgcgaacttcctgaaagttgttaaccagatcaaaacccgtctgggcgcgaacccggttccgctgcagctggcgattggtgctgaagaacatttcaccggtgttgttgacctggtgaaaatgaaagctatcaactggaacgacgctgaccagggcgtaaccttcgaatacgaagatatcccggcagacatggttgaactggctaacgaatggcaccagaacctgatcgaatccgcagctgaagcttctgaagagctgatggaaaaatacctgggtggtgaagaactgactgaagcagaaatcaaaggtgctctgcgtcagcgcgttctgaacaacgaaatcatcctggtaacctgtggttctgcgttcaagaacaaaggtgttcaggcgatgctggatgcggtaattgattacctgccatccccggttgacgtacctgcgatcaacggtatcctggacgacggtaaagacactccggctgaacgtcacgcaagtgatgacgagccgttctctgcactggcgttcaaaatcgctaccgacccgtttgttggtaacctgaccttcttccgtgtttactccggtgtggttaactctggtgataccgtactgaactccgtgaaagctgcacgtgagcgtttcggtcgtatcgttcagatgcacgctaacaaacgtgaagagatcaaagaagttcgcgcgggcgacatcgctgctgctatcggtctgaaagacgtaaccactggtgacaccctgtgtgacccggatgcgccgatcattctggaacgtatggaattccctgagccggtaatctccatcgcagttgaaccgaaaaccaaagctgaccaggaaaaaatgggtctggctctgggccgtctggctaaagaagacccgtctttccgtgtatggactgacgaagaatctaaccagaccatcatcgcgggtatgggcgaactgcacctcgacatcatcgttgaccgtatgaagcgtgaattcaacgttgaagcgaacgtaggtaaaccgcaggttgcttaccgtgaaactatccgccagaaagttaccgatgttgaaggtaaacacgcgaaacagtctggtggtcgtggtcagtatggtcatgttgttatcgacatgtacccgctggagccgggttcaaacccgaaaggctacgagttcatcaacgacattaaaggtggtgtaatccctggcgaatacatcccggccgttgataaaggtatccaggaacagctgaaagcaggtccgctggcaggctacccggtagtagacatgggtattcgtctgcacttcggttcttaccatgacgttgactcctctgaactggcgtttaaactggctgcttctatcgcctttaaagaaggctttaagaaagcgaaaccagttctgcttgagccgatcatgaaggttgaagtagaaactccggaagagaacaccggtgacgttatcggtgacttgagccgtcgtcgtggtatgctcaaaggtcaggaatctgaagttactggcgttaagatccacgctgaagtaccgctgtctgaaatgttcggatacgcaactcagctgcgttctctgaccaaaggtcgtgcatcatacactatggaattcctgaagtatgatgaagcgccgagtaacgttgctcaggccgtaattgaagcccgtggtaaataagcctaagggttaataccaaagtcccgtgctctctcctgaaggggagagcactatagtaaggaatatagccgtgtctaaagaaaaatttgaacgtacaaaaccgcacgttaacgttggtactatcggccacgttgaccacggtaaaactactctgaccgctgcaatcaccaccgtactggctaaaacctacggcggtgctgctcgtgcattcgaccagatcgataacgcgccggaagaaaaagctcgtggtatcaccatcaacacttctcacgttgaatacgacaccccgacccgtcactacgcacacgtagactgcccggggcacgccgactatgttaaaaacatgatcaccggtgctgctcagatggacggcgcgatcctggtagttgctgcgactgacggcccgatgccgcagactcgtgagcacatcctgctgggtcgtcaggtaggcgttccgtacatcatcgtgttcctgaacaaatgcgacatggttgatgacgaagagctgctggaactggttgaaatggaagttcgtgaacttctgtctcagtacgacttcccgggcgacgacactccgatcgttcgtggttctgctctgaaagcgctggaaggcgacgcagagtgggaagcgaaaatcctggaactggctggcttcctggattcttatattccggaaccagagcgtgcgattgacaagccgttcctgctgccgatcgaagacgtattctccatctccggtcgtggtaccgttgttaccggtcgtgtagaacgcggtatcatcaaagttggtgaagaagttgaaatcgttggtatcaaagagactcagaagtctacctgtactggcgttgaaatgttccgcaaactgctggacgaaggccgtgctggtgagaacgtaggtgttctgctgcgtggtatcaaacgtgaagaaatcgaacgtggtcaggtactggctaagccgggcaccatcaagccgcacaccaagttcgaatctgaagtgtacattctgtccaaagatgaaggcggccgtcatactccgttcttcaaaggctaccgtccgcagttctacttccgtactactgacgtgactggtaccatcgaactgccggaaggcgtagagatggtaatgccgggcgacaacatcaaaatggttgttaccctgatccacccgatcgcgatggacgacggtctgcgtttcgcaatccgtgaaggcggccgtaccgttggcgcgggcgttgttgctaaagttctgggctaattacacgttaattagttttgaattgaaaagggcgcttcggcgccctttttgcatttgttgacggcatatcttattcgtactgtcagaacgaataaattattcatatttaaaatatcaattcaatttaacattttaaatatgaatgtttctgtttttaaaatgcttcatttgtcaggcttttttcttatttttaatgccgtaatttaattcatattgaagggttctcgtaaaacgtaaataattcctgcgtaggacttttgttttgcagtttttacgtcacaagggattataatgaaattaaatatatttactaaatctatgattggtatggggctggtgtgttccgctctgccagcattggcaatggaagcatggaataaccaacaaggtggtaataaatatcaggttattttcgatggcaaaatttatgaaaatgcctggtgggtttcttctacaaattgcccgggaaaagcgaaagcaaatgatgcaactaacccgtggcgtttaaagcgtaccgcaacagctgctgaaattagtcagtttggcaatacactttcctgcgaaaagagcggcagctcatcttcttcaaattcaaatacgcctgcatccaatacgccggctaatggcggttcggctacaccagcacagggcactgttccgtctaattcttctgtagttgcctggaataaacagcagggcggtcagacctggtatgtcgtctttaatggtgcggtatataaaaatgcctggtgggtagcctcttctaactgtccgggtgatgcgaaaagcaatgatgccagcaacccatggcgttatgttcgtgccgctacggcaacggaaatctcagaaaccagtaatccacagtcctgtacttcagcaccacagccttcaccggatgtgaaaccggcaccggacgttaaaccggctcctgatgttcagccagccccagctgataagtcaaacgacaactatgctgtagtagcctggaaaggtcaggaaggttcttctacatggtacgttatctataacggcggcatttataagaacgcctggtgggtaggcgcggcaaattgcccaggcgatgcgaaagaaaacgatgccagtaacccatggcgttatgttcgcgcggcaacggcaacagaaatcagccagtatggtaaccctggctcctgttccgttaagccggataataatggcggtgctgtgactccggttgatccaactccggaaacaccggtgaccccaactccggataacagcgagccatcaacaccagcggatagcgttaacgattactcattgcaagcgtggagcggccaggaaggtagcgaaatttaccatgttattttcaatggtaatgtttacaagaacgcctggtgggttgggtctaaagattgcccacggggtaccagcgctgaaaactccaataacccatggcgtctcgagcgtacagctaccgctgcggaattgagtcagtacggtaacccgactacctgtgaaattgataacggcggcgtcattgttgcggatggtttccaggccagcaaagcgtacagcgcggacagcatcgtagattataacgatgcacattataaaacttctgtcgatcaagacgcatggggctttgtcccgggcggcgataacccgtggaagaaatacgaaccggcgaaagcatggtccgcatccactgtgtacgtgaaaggtgatcgcgttgttgttgatgggcaggcttatgaagcgctgttctggacgcaaagtgacaaccctgctctggtggcgaaccaaaacgccaccggtagcaatagccgcccgtggaagccgttaggtaaggctcagagctatagcaacgaagagctgaataatgcgccgcagtttaatccagaaacgctttatgccagcgatacgctgattcgctttaacggtgtgaactacatttctcagagtaaagtgcagaaagtttctccttctgacagcaacccgtggcgtgtttttgttgactggaccggaaccaaagagcgcgtaggtacgccgaagaaagcgtggccgaaacacgtttatgcaccgtatgtcgactttacgctgaatacgatcccggatctggctgcgctggctaagaatcataacgtcaaccacttcacgctggcgtttgtggtgagtaaagatgcgaacacctgtctgccgacatggggtaccgcttacggtatgcagaattacgctcagtacagcaaaatcaaagctctgcgtgaggctggcggcgatgtgatgctgtctatcggtggtgctaacaacgctccgctggctgcttcctgtaagaacgtagacgatctgatgcagcattattatgacatcgttgataacctgaacctcaaagtcctggacttcgatatcgaaggcacctgggttgcggatcaggcatctattgaacgtcgtaaccttgctgtgaagaaagtgcaggataaatggaagtcagaaggcaaagatattgctatctggtacaccttgccaattctgccgactggcctgacgccggaagggatgaatgtcctgagcgatgccaaagcgaaaggtgttgagctggcgggtgtgaacgtgatgacaatggactacggtaacgcgatttgtcagtctgcaaataccgaaggccagaacattcacggtaagtgtgcaacgtctgcgattgccaacctgcattcacaattgaaaggcctccatcccaataagagcgatgcagaaattgacgctatgatgggtaccacgccgatggttggcgtgaacgacgttcagggcgaggtgttctatctctctgatgctcgtctggtcatgcaggatgcgcagaagcgtaatctcggtatggttggtatctggtcaatcgcgcgcgacctgccgggcggcactaacctgtctccggaattccacggcctgactaaagaacaggcaccgaagtacgcatttagcgaaatcttcgcgccgtttactaagcaataaatgtgttggcgataccttccagtatcgccgcattttttgtcaatgggctacttttggtagcccattatttttattcatatttctattctttgcttaaaaaagagtctttccgtaattgaaataagaactattttcatttatttttgaagaaagtatacgggagtctctatgtacgtttgtctttgtaatggtatcagcgataaaaaaattcgtcaggctgtgcgccagttttcccctcactcgttccagcaattaaaaaaatttattccggtcggcaatcagtgcggtaaatgtgtccgggccgcgcgtgaagtgatggaggatgaattaatgcagctgccggagtttaaggagtccgcataaacggagtgtgttttttgacttactcgtaagccgttctactcttcaaagagtggaagcgaaggagtcaaaaaatgaaaggtgatactaaagttataaattatctcaacaaactgttgggaaatgagcttgtcgcaatcaatcagtactttctccatgcccgaatgtttaaaaactggggtctcaaacgtctcaatgatgtggagtatcatgaatccattgatgagatgaaacacgccgatcgttatattgagcgcattctttttctggaaggtcttccaaacttacaggacctgggcaaactgaacattggtgaagatgttgaggaaatgctgcgttctgatctggcacttgagctggatggcgcgaagaatttgcgtgaggcaattggttatgccgatagcgttcatgattacgtcagccgcgatatgatgatagaaattttgcgtgatgaagaaggccatatcgactggctggaaacggaacttgatctgattcagaagatgggcctgcaaaattatctgcaagcacagatccgcgaagaaggttgagccgtgtcgggagggagaaccctcccggttaataagagatccaggccagataccccaggtttatcatgctgccgagcgcaagccacgggccgaatgcgatagtggttatagtccggcgttgcagaagttgtgaaacgatggcgtaaccaatgccacccagcgaggcaatcagcagtatcattggcaacgtttgccagccacaccatgcgcctgcagcggccagtagcttgaaatcaccgtagcccaatccctctttgtgacaaactaaccagacgccccagtaaacacaccacagcaccccatagcccgctaccgcgccgtaaaccgcatcatgtaaatcaattaatccatactgcgcattaaataccaagccaagccagagcagcggtaaggtgagtttgtcgggcaggagctgagtgcgaaaatcaataacactgagcgtgagtacgaaacagaaatagagaaagagtgcgccagtcacgatgggcgtgaaaggtgccagggcgcaggcgatagcagcagcaacacaaagtatcaggggcactgtatcatgccaggcatattttttttgcctgaaatgaaccaatacctggcgaaacgttaacgccgttttatcctccaacggcgagaggtgataggcgatggcattaacaaaataatctgcaataaaaccaaccagaatgaagagcggcagtagcattgtcattattgttgctccctgaaggacaaatgcctgagggtgatctcttcgtttccggcaagagtaaactgaaggtcttcaataacaataccgtatgttacctgtgccgtagtgagccagcgggagacgttttcgaggggagctgtgacaggatgaattgtcagagtattgtccgggccgttttccagcgtgatagccaaattctcacgttttgcttcctcgagaaggatatttttgatgggctgcgtaagcgcaggatgaccgagtaaaccatgggtgctcgcttgatcctgcatccatttgatgtccttcttaattttttgcgcgtgggactgatgctctgcaatgtaggtatctatcggttttatcaccccaagccaacaaaaaacgccgagcgagagaaccgccagtgccgcaacgatctgtttttccgatgtggatttttctgcccaccatgatttaatcatttccctgagttccttactgtccatacaccactgaccggatctttttctgttttttccatcggaagccaggactgtgttaactcacagaaacgatcgatattagcttcactcttagcactcatttttaaggtcagcgacttttgcttctggctatagttcgcctccattaactgcagttcagggtgttccagcagaagtgtttgtaaatgatagagcaacggcacagcttcaggatattgctgagcgagttgctgcttaaagtaaaaacgaaaattgtgggtgcgtttgatctgcgggaaataacgttgccaggtttcttgctgttgttgctgaagttgatcttcaatcttaagcgtatgccagagcgcgatgctccggctgccaacaaaagaaagaatggcgagaacgagacagcttactgccaggcgggcgagccattttcccgatttgcttacagttttctgtttacgaaaaataccatgcagcatgtcatagcgctggaatgcaatatcggcagaatacaaactcagtgatggtatttcaggatgctggataagtggattggccgctgcaacgccgtgaggtactacaccataacaaagcatattctcaggcggaaactgggcagcaagatgctgtaaccagtgttcatccagttcgttgaaggcatgtgcggcactgcgaatgagccagcttgtttgctggttaaccagagtccagctatctacttcccagggaagatagcagccatctggcaaaacccgcgtcacgttgagtccggcagtatgtaaacgctcaagatagcgactgagtttctccgactgaatgcctatcacctcgacactttcgttttgtttatcgacaaccgtccagtgccagtcctgggtgttgtcgggtaacgtctcctctgccagccattgtaatgtttgtgcggtgagtttgtatttggcgttgggcagcgtgagggaacgatataaaaggccctctggtgggatcaaaagatgaacatttccggcaccgggctgatcggccagcgactccagcggaagatcgtccgtgagcgtatgtaccgaagatacgctatctgcggagaacgtcatccattcccaatgcttacgcagcgtcgaggaagaacgtatgaccatcaacgattcaggcatcacgatccttatgattagtagagttgcagcgtacgccgatagatttgggcgctctgctgtttacggttgaaaaaaatatggctttgccatccctgggattgttcgtcgctgatactttccgtactcagcgtaaaatagcggctatagggaaagagatgccttttcacctgagcaaccagtggcttcacaccggagaaatcctgctgcgcccagtaaagaaatgcatccgtggttagccagccttccctcggccttttttgcaataagacccgagcgtcagcatccgtgatgttattgaggaataacgctctgaagagcggaatatcgttctccgttagcatattaagattgatgctaagttccgtggtcgggagaacgcagacatacgggataagccgctgatagatgttttcggttatgccttttatctgacgtaattcgccagtcagaaaaagcatctgattggcactatgccggggcggcgtctggctttggtaaaagctatcttctgcgccgtgaaagcgtggtgagtcatcgacatcaatatagtcagcgattgattgcacgatctcatcggtgtttccgcgatcgataccggcgttaatcagcagcgcactgaatacctgggcggggaaatcaggggaagccagcgggtcgtcagagatttttgctaacgcattgagattaaaacagtgctgggcatcgcgtaactgccacttcactgtattgccatcttccagctgcaactgttgtggctgtgcccagtactgctgcaacgtggtctgtctgtcgttatctttaacgtcctgggtgaggctggcaagcgcaagtttctccgccagttcaatatcatattgccgttgcagatgatggtttacctggcgggttcgctgaagctggctgtgaaaactgagcgtcatgtctgctgccagagcagccatgagcgccagtaacatgagtacaatgagcagcgcgacgccgcgttgttcattattcatggttattattcccggcctgcgtctgagctggcgactcttctctcgctaactgctcaggtaatgcaaaacggcgctgtaaccccccatattgctgagtctgcagatgtaacgtgactgagagaggaagttcctggctttccccgctgttactttccagaagaaagctctcgacatgttccagcatcgcctgggcgggttgatccttcctgccatccacagaagtacgaacagcacggtagagcgtatgatttcgcagataccagtgaacagtgagtaaggtttgtgcttcactgagaggagccagcggatcgcgactttgcgtggtaaaaatagcttcttcacccaacaccatgattttgtccgtactccgattcctccgggcgaccagttgcaggagatcgttatcaagaatggtgatggtgcgctgtagctgattgaactgctggatttctttctgtgagcgttgatgcaactcggaagcttgcgaaaaaatcataaacgccagcacgctaagcattgagaaaatcgccagcgccgccatgacctccagcaatgtgaaaccctgctggcgattaatcatcttgtgcctgcccggatttattatcgatgctttgataacgcgtaagcgaggttgtctgaccgctgggtaatgtcaccgttatggtgcgttccagaagcgtgccgtctttgcttgagtggatatcgctgcgccagttccactcttcgccatttattaactctttgccagaactggacgtgttttcctcgccgaatgaatcttgtgactgaagctggttatccgctatccacaatgccagcgtctcgttacgcattcgctcgatggcatttcgttgcccttgcatactgctcattaaagtcagagcaacagcggtgaaaatactcatcgccagtaagacttcaagcagtgtcatccctgattgtttgttcatgggcgggtatctctggcgagcgtttgatccaggggccatgagcctgaacagactaacgtcaggagcggctcaccggtcccggcgttagccatcaacaaagagaagggcgtgatttgtccgtcggccagaatcacaacctgtggctggttgctgtcatcaggtttaaatggctgaagatgaattgagagttcttcatcccagtcattttggctctcgtctgcggcatcttcttgtaatggaacccagcgccaggctgatggtgttttgcccggtaccataatgcgccatgctgaatcagagaaatggataccgacaggctgaccactgagcgtggcgcggtcgatggctaattcaagtgcagcggtaaaccgcgccgctgtttcgcgcgcacgagtgctggcgacatcctcccggccatatgtgaagagcaccacgcttgccgtgatagcgaccagcgccagcaccagcatcatctccagcagggtaaacccgcgttgctgattcatcgctgacttactttttcttcttgctcaaaccccagttggtgatgtcgtcctcggttcccatttcaccatcgggccctgctgaaagcagatcgtatgcaccatgttcaccaggattaacgaggacataatcattgccccagggatcggcaggcagacgcttgatataaccttccttgttatagtttgcggccagcggtggcagtgtcggcgcttctactaaggattcaagcccctgatttgtggttggatagtgatgattgtcgagtttgtacatatcaagggcgttttccagcgccacaatatcgctgacggctttttgcttatccgccttttctttattgcccattaggttaggaaccaccaggctggcaagtacgccgataatgacgatcaccaccataatttccagtaatgtaaaaccgcgttgcttatccgttgcgcgcatatgctttccttaattaatcattgagttaagttgaagaagaggttggagtaccgacacgacaataaacaggacgatcagtgccatcgtaataatgagtgctggctcgaagatggagagcgttaaggcgatccgattttgttggagtgtctcctggttatctgcggctctgaccattaatgtgccgagctgcccgcttttttcgccagaggccaccatgtagagcatcatcggcgggaaaattgcggtttgttccagcgaaagatgaatgctgttaccctggcgaacgttctctgccgcatttgccagacgctggcgaatttcgaggttgttgaggctttcggtggacaaattcatcccatccagcagagggacgccgctggattgcaaaatacttaaagtgcggagatagcgtgcgctgttaatggcgcaaatcagcgggccgatgagcgcaacgcgcagcaacatggcatgaaaacggtggcggttattgccgcgttttaaccagagccagaaacctacagcgacaataaacactgtcgctaataatgtcgggccggtacgttgcaacgtgtcgctcagacctaaaagaatgcgtgtactcagcggcagttgctgcttcatatgcacgaactgttcggtaattttgggcacgacagcagtgaggagaataatcacgaccccaatcgccaccgtagtgagcatacaggggtagatcagtgactgaatgagcttgctgcggattttctgccggttttcattgtaatcagccagcttttccaacaccggggccagcagcccgctcttttcgcccgcttttaccagggtacgatagagcgaatcgaaaagcgtgggaaaatgctgtaatgcatcggaaaggggatgcccttcaaggatggcgctgcgtacctgatttaacacgtcacccagtcgtttattactgctttgttgaccgattacggcaaggctctcttccaggggtaatgccgctgcgcttaaggttgccaactgccgggtgaaaagcgtcagttcactatggctgatcctcgggcgacgtgtttttactcccgaacttttttgggggcgaatatccagcaggaaaagcccttcttcacgcagccgcagtcgtgcctgacgttcatcgttagcatcaatgatcccttgcaatttttgaccatcctgggtcatggcgcgatagcgataattcatgcttcgctctccagcgtggcactggcgacgcgcataacctcatcccaggaggtgtcaccgcttatcactttttgcaggccatttttgattaaggccttgtgttgttgccggactagtcgctccagtgcttgttcatccacattttcatgaatagcggcccgtaattccggcgtcaccaccatcatttcgtggatcgccatgcgcccctgatagccggattgatggcaatgagggcagcctacgggagtgccaattgttgtcaccgcgagctgatgatatttaaacatctgcgcttgttggggtgatacgggcgtgaattgtcggcattgcggacacaggcgacgaaccagacgttgcgcgataatccctgccagggaagacgaaagcaggaatgattcgacgcccatgtcgcggagccgggtcactgcgcctgatgcactgttagtgtggagtgttgagagtaccagatggccggtgagcgaggcctgaaccgcaatctgcgcggtttctgtatcacgaatttcccccaccatgacgacatccgggtcctggcgaagtatggcgcgcaggccgcgagcgaaagacatatccacacgggtattcacctgcgtttgcccaatgccttccagctcatattccacgggatcttctaccgtcagaatattgcggccgggagtattcagcgccgaaaggatggcgtagagcgtggtgcttttaccggagcctgtcggccctgtcaccaggataataccgtgcggaagctgaatgagattttctaaatcctgcttatccgctgccgtcatccccaggttgttcaatgaaagctggaggctgtttttatccagcaggcggagtacggcgcgttcaccatagatggacggcagtgtggatacgcggacatctatgttacgtcgcccgatacgcaaactaattcttccatcctgtggaatacgtttttcggcgatatcaagacgagccatgaccttaattcgggagataagcagtgccgccagttttttgtttggctgtaaaattgtccgcaaaacgccgtcgatgcgaaaacggatcgacattgttttttcataggtttcaatgtggatatcagaggcggtttctttgatggcctcactcaaaatcgcattgatcaagcggataaccggtgccgctgaatcttcattcaggagatcttcatttgcgggcatctcttccgaaagcgagagaagatcgacggattgatcgatatcctgcgcaatctgttgcgactcaccggtattctgatggaataccgcttccagccgagcttcaaaatcagcctgtgacaagctggtcatggtctggcactggccaacctgacgttgaatatcgagtaaccgctcgaatggcgtatcggcgagataaataatctcgccctctgaatagagataaccaattcgttgtgccagcgcccaactggcggggtacggtgagtgaattctcatatgaatgcctcaccgtgacgatggcgcaggggcgtgactgttgaacgtgttttcatccagcaccggcaaatcttccgagccaaccagcgcttttgatttcccgtcgatccgctgttgttgctcctgacggtaacgggtgtatttctcttttgacagtgagcgataaacatcatcgtcacggataatcgtcggacggataaataccatcaggttgcgtttagcgcgctcggtggaggtatagcggaagagttgccccactaaaggaatatcgccaagcagaggaacctttgacacttgctctttagaaaaatcatccagcaatccgcccaggaccaccgtttcaccggttttgaccagcacggcgttttgaatagtacgggtattaaacgtcgggccgagcgtcgagttagaggaagagtcaacgctggagacttcctgctctatttcgagcaacaccgcgtcgccttcattgacctgcggagtaactttgagttttgtccccaccgttttgcgttcgacggtattaaagacgttatcccctgaagtggtctgtgacccggatagcaccggcacatcctgccccacgttgaaggacgcgagtttattatccagcgttacgatgcttggggtggcgaggatgtcatttttattgttactggccagcgcggtaagcagtactccccagtcgccattgaagaagcctgcggccatgccattgtaggcgctaaacatatcccaggcaggattcgcgctggtgatcccaccattctttttataatcagccacaccttgcgcagcgttaaaaatcggtaatccggtattggtaaattgctgtgcgccaacgtttttattcgcccattgcacgccgaggtttagtccatttccatcctgaacttcaacgatgattgcctcaaccagcacctgtgcacggcgaatgtccagacgcgcaattaccgtggcgagtttttcctggacggactggtcagcggtaatgaccagagagttagtctgttcatcggcggtaatggcgacgttatccatcgcgccagaagaggagggcttacgcgcattccctttttcatctttcagcttttcggaaacaccggttagcacttccaccagattcgtggctttagcatatttcaggtaataaacccgggtatttccttcctcgctctcttcgacatcaaggcttttcagtaatgaagtgatgcgctggcgtgctttttccggtccactgatgataagagagttggttcgcttatccgccacaatcttcgcggagaggagggctggcatctggcttttaccgtggctttcgctgattaattgattaagaatctcggcgagatcttccgctgacgcatattccagatgaataatttgctgcttctctgtgccgatgacatcaacgcgctttatgacttcaatcagtttattaatggtggaggcacgaccggtcagaataagaacgttggagggttcataatgcacaacattaccgacgctacccgcatccatcatctggcggagcaggggggccaggtcacgagcaggaacgttctcaagcggtacaattcgggtgaccaactcatcacctacgcctggacgagaactgtcagcaatcatccctggcgatgtttttacattagctgagcgaaccactttcagaaaaccattgtccagcgtgatcacggaataaccgtaaagatcaagaatacttaaaaagaactggtagtactcctgttggctaaacgtatcattactgcgtacggaaatggttccctgtaccgaagggtcgatcaggatcgttttgccaagatgctgacccactatttccacgaactggcggatatcggcgttattgaagttcgcgccgtattgttcgttctcagcgtgtcctgcacaaggcatgagtagtgctgccagcaagcagcaggtgattttattgagtcctttcatgacgcagtccattcattcctgtaagttccccgacggaaacatttatcaagcggggtacgccgttgcgacgaattgtaaactgagcactttgttgagttagcagtaaacttaatgcctgtgaaacctcatcagggtgggtcagcgaaagattattgatcctgagggcgatatcccctggttgtagcaagctggtggtaaatgcattgaggcccttacgagggttcaatcgaagcccgtatatctgttctccatcacgtataggcgtggcgataatataatcagcgagtacattttgactttctgaatcaggctgcttgatgatgtcaggtagccctggatggagagttactttttcgtaatgcccgtgagtttcaaacacaacgctggttttatttatttttctaataaacgttcccggcgctgactcaagggcttcgttgagggagtatcgcttttgttcgctcccctcattaattaagacaaaagaagtctcatcattcgatgtgagtacaatgccattaagcgctatagagagcttaggtgtttcctgattaactgccacgggatttgcatcttttaccccagcatgattttcgttacgccataaagcggcaaggctgaaatcagactgaaatgcgtttgttggttgattaatgatctgtccatttttaactatagttgtatggaaataattcacattaaaaataatcgaccctatgcttataaatataatcaatatattgatggcagcatctttattatgattcgccagatggaaggggaaacgtagtgtgggcacgatgtatgttctaataaaatagattgggtgggttgtatattgacgttagtataaatagtattaatgccgcttgcatgaatcaagcaaaatttatttatattagtaatatgtatttaattaataaatacatacattatttttatgattaaggataatcaataattaaaacaggaagttctatgtctacgagaagagaagttattctttcctggttgtgtgagaaacgtcaaacctggcgtctatgctatttgttgggtgaggctggaagtggaaaaacctggctggcgcagcaactgcaaaaagataaacatcgccgtgtgattactttaagcctcgttgtttcctggcaaggtaaggccgcatggatcgttaccgacgataacgcggctgaacagggctgccgtgacagcgcctggacgcgagatgagatggcggggcaattactgcatgcgcttcatcgaactgatagtcgctgccctcttattattattgaaaatgctcacctgaatcaccgccgcatacttgatgatctccaacgcgcaatatctcttattcctgacggtcaatttttgctgatcggcagacccgatcgaaaagtcgaacgtgattttaaaaaacagggcattgaacttgtctcgataggacgtctgacggagcacgaacttaaggcaagcatccttgaaggtcagaatattgaccaacccgatctccttttaaccgccagagttctgaaacggatagctttattatgtcggggcgatcgcagaaagctggcgcttgccggcgaaacaattcgcttattacagcaagccgagcagaccagcgttttcacagcaaaacaatggcgaatgatttaccgcatattgggtgataaccgcccccggaaaatgcagcttgccgtggtgatgagtggaaccattatcgctcttacctgtggttggctactgctgtcctcttttacagctacgttacccgttcctgcgtggctgatacccgtaacgccagtagttaaacaagatatgactaaggatattgctcatgtggtgatgcgcgatagtgaggcgctaagcgtgttatacggcgtatgggggtacgaggtcccagctgattcggcctggtgcgatcaggcagtaagagcggggctggcatgtaaaagtgggaatgcttctttacaaacattggtagatcagaatttgccctggatcgcatcgcttaaagtcggggacaaaaaattgcctgttgtggtcgttcgcgtcggtgaggctagcgttgatgtcctcgtaggtcagcaaacgtggacgctgacacataaatggtttgagtcggtatggacgggtgattatcttctgttgtggaaaatgtcgccggaaggggagagtaccattacgcgtgatagcagcgaggaagagattctctggctggaaacgatgttaaaccgcgcattgcatatttcgacagaaccttcggcggagtggcgtcccttgttggtagaaaaaataaagcaatttcaaaaaagccaccacttgaaaactgacggtgttgttggcttttcaacgttagtacatctctggcaggtggcaggggagagtgcctacttatatcgggatgaagcaaatatttccccggaaacaacagtgaaggggaaatgacatgtttgaattctatatcgccgcgcgtgagcagaaagaaacaggtcaccctggtatcttctcccgacaaaaacacagcaccataatatatgtaatttgtttattactgatttgcctgtggtttgcaggaatggtgctggttggtgggtatgccaggcagctatgggtgctttggatagtaaaagccgaagtcactgtagaggctgaaacgcccgcttttaaacaatcaacacaacactatttcttcaaaaaacagccactccccgtcgtcgaatccgtcgaggaggaagatgacccaggcgtcgcggttgagaatgccccctcttcttctgaagacgaagaaaatactgtggaagaaagcgaagagaaagccggtttaagagagcgtgtcaaaaatgcactgaacgaacttgagagataacccgaaggctgtttactttactagcaatacgcttgcgttcggtggttaagtatgtataatgcgcgggcttgtcgtagttgacagcaggttcaatctgaacctcagttagccgaatttggctacctaacaatgctcccaatcggggagctacgtaagaacggttacactctcccatcaatcgtaatgggtctgaggagtaatcattttcgtttataaaataattggagctctggtctcatgcagaaccaaagaatccgtatccgcctgaaagcgtttgatcatcgtctgatcgatcaagcaaccgcggaaatcgtcgagactgccaagcgcactggtgcgcaggtccgtggtccgatcccgctgccgacacgcaaagagcgcttcactgttctgatctccccgcacgtcaacaaagacgcgcgcgatcagtacgaaatccgtactcacttgcgtctggttgacatcgttgagccaaccgagaaaaccgttgatgctctgatgcgtctggatctggctgccggtgtagacgtgcagatcagcctgggttaatcaggtcattgagcgattgagaggttgaaacaatgattggtttagtcggtaaaaaagtgggtatgacccgtatcttcacagaagacggcgtttctatcccagtaaccgtaatcgaagttgaagcaaaccgcgttactcaggttaaagacctggctaacgatggctaccgtgctattcaggtgaccaccggtgctaaaaaagctaaccgtgtgaccaagcctgaagctggccacttcgctaaagctggcgtagaagctggccgtggtctgtgggaattccgcctggctgaaggcgaagagttcactgtaggtcagagcattagcgttgaactgtttgctgacgttaaaaaagttgacgtaactggcacctctaaaggtaaaggtttcgcaggtaccgttaagcgctggaacttccgtacccaggacgctactcacggtaactccttgtctcaccgcgttccgggttctatcggtcagaaccagactccgggcaaagtgttcaaaggcaagaaaatggcaggtcagatgggtaacgaacgtgtaaccgttcagagccttgacgtagtacgcgttgacgctgagcgcaacctgctgctggttaaaggtgctgtcccgggtgcaaccggtagcgacctgatcgttaaaccagctgtgaaggcgtaaggagatagcaatggaattagtattgaaagacgcgcagagcgcgctgactgtttccgaaactaccttcggtcgtgatttcaacgaagcgctggttcaccaggttgttgttgcttatgcagctggtgctcgtcagggtactcgtgctcagaagactcgtgctgaagtaactggttccggtaaaaaaccgtggcgccagaaaggcaccggccgtgcgcgttctggttctatcaagagcccgatctggcgttctggtggcgtgacctttgctgctcgtccgcaggaccacagtcaaaaagttaacaagaagatgtaccgcggcgcgctgaaaagcatcctgtccgaactggtacgtcaggatcgtctgatcgttgtcgagaagttctctgtagaagcgccgaaaactaagctgctggcacagaaactgaaagacatggctctggaagatgtgctgatcatcaccggtgagctggacgaaaacctgttcctggctgcgcgcaacctgcacaaggttgacgtacgcgatgcaactggtatcgacccggttagcctgatcgccttcgacaaagtcgtaatgactgctgatgctgttaagcaagttgaggagatgctggcatgattcgtgaagaacgtctgctgaaggtgctgcgtgcaccgcacgtttctgaaaaagcgtctactgcgatggaaaaatccaacaccatcgtactcaaagttgctaaagacgcgaccaaagcagaaatcaaagctgctgtgcagaaactgtttgaagtcgaagtcgaagtcgttaacaccctggtagttaaagggaaagttaaacgtcacggacagcgtatcggtcgtcgtagcgactggaaaaaagcttacgtcaccctgaaagaaggccagaatctggacttcgttggcggcgctgagtaagtcggaggagtaatacaatggcagttgttaaatgtaaaccgacatctccgggtcgtcgccacgtagttaaagtggttaaccctgagctgcacaagggcaaaccttttgctccgttgctggaaaaaaacagcaaatccggtggtcgtaacaacaatggccgtatcaccactcgtcatatcggtggtggccacaagcaggcttaccgtattgttgacttcaaacgcaacaaagacggtatcccggcagttgttgaacgtcttgagtacgatccgaaccgttccgcgaacatcgcgctggttctgtacaaagacggtgaacgccgttacatcctggcccctaaaggcctgaaagctggcgaccagattcagtctggcgttgatgctgcaatcaaaccaggtaacaccctgccgatgcgcaacatcccggttggttctactgttcataacgtagaaatgaaaccaggtaaaggcggtcagctggcacgttccgctggtacttacgttcagatcgttgctcgtgatggtgcttatgtcaccctgcgtctgcgttctggtgaaatgcgtaaagtagaagcagactgccgtgcaactctgggcgaagttggcaatgctgagcatatgctgcgcgttctgggtaaagcaggtgctgcacgctggcgtggtgttcgtccgaccgttcgcggtaccgcgatgaacccggtagaccacccacatggtggtggtgaaggtcgtaactttggtaagcacccggtaactccgtggggcgttcagaccaaaggtaagaagacccgcagcaacaagcgtactgataaattcatcgtacgtcgccgtagcaaataattttagaggataagccatgccacgttctctcaagaaaggtccttttattgacctgcacttgctgaagaaggtagagaaagcggtggaaagcggagacaagaagcccctgcgcacttggtcccgtcgttcaacgatctttcctaacatgatcggtttgaccatcgctgtccataatggtcgtcagcacgttccggtatttgtaaccgacgaaatggttggtcacaaactgggtgaattcgcaccgactcgtacttatcgcggccacgctgctgataaaaaagcgaagaagaaataaggtaggaggaagagatggaaactatcgctaaacatcgccatgctcgttcttctgctcagaaggttcgccttgttgctgacctgattcgcggtaagaaagtgtcgcaggctctggatattttgacctacaccaacaagaaagcggctgtactggtcaagaaagttctggaatctgccattgctaacgctgaacacaacgatggcgctgacattgacgatctgaaagttacgaaaattttcgtagacgaaggcccgagcatgaagcgcattatgccgcgtgcaaaaggtcgtgcagatcgcatcctgaagcgcaccagccacatcactgtggttgtgtccgatcgctgagactctggagactagcaatgggtcagaaagtacatcctaatggtattcgcctgggtattgtaaaaccatggaactctacctggtttgcgaacaccaaagaattcgctgacaacctggacagcgattttaaagtacgtcagtacctgactaaggaactggctaaagcgtccgtatctcgtatcgttatcgagcgtccggctaagagcatccgtgtaaccattcacactgctcgcccgggtatcgttatcggtaaaaaaggtgaagacgtagaaaaactgcgtaaggtcgtagcggacatcgctggcgttcctgcacagatcaacatcgccgaagttcgtaagcctgaactggacgcaaaactggttgctgacagcatcacttctcagctggaacgtcgcgttatgttccgtcgtgctatgaagcgtgctgtacagaacgcaatgcgtctgggcgctaaaggtattaaagttgaagttagcggccgtctgggcggcgcggaaatcgcacgtaccgaatggtaccgcgaaggtcgcgtaccgctgcacactctgcgtgctgacatcgactacaacacctctgaagcgcacaccacttacggtgtaatcggcgttaaagtgtggatcttcaaaggcgagatcctgggtggtatggctgctgttgaacaaccggaaaaaccggctgctcagcctaaaaagcagcagcgtaaaggccgtaaataaggagcgtcgctgatgttacaaccaaagcgtacaaaattccgtaaaatgcacaaaggccgtaaccgcggtctggcgcagggtacggatgttagcttcggcagcttcggtctgaaagctgttggccgtggtcgtctgactgcccgtcagatcgaagcagcacgtcgtgctatgacccgtgcagttaagcgtcaaggtaagatctggatccgtgtgttcccggacaaaccgatcactgaaaagccgctggcagtgcgtatgggtaaaggtaaaggtaacgtggagtattgggttgccttgattcagccgggtaaagtcctgtatgaaatggacggtgttccggaagagctggcccgtgaagcattcaagctggcagcagcgaaactgccgattaaaaccacctttgtaactaagacggtgatgtaatgaaagcaaaagagctgcgtgagaagagcgttgaagagctgaacaccgagctgctgaacctgctgcgtgagcagttcaacctgcgtatgcaggctgcaagtggccagctgcaacagtctcacctgttgaagcaagtgcgtcgcgatgtcgcacgcgttaagactttactgaacgagaaggcgggtgcgtaatgaccgataaaatccgtactctgcaaggtcgcgttgttagcgacaaaatggagaaatccattgttgttgctatcgaacgttttgtgaaacacccgatctacggtaaattcatcaagcgtacgaccaaactgcacgtacatgacgagaacaacgaatgcggtatcggtgacgtggttgaaatccgcgaatgccgtccgctgtccaagactaaatcctggacgctggttcgcgttgtagagaaagcggttctgtaatacagtacactctctcaatacgaataaacggctcagaaatgagccgtttattttttctacccatatccttgaagcggtgttataatgccgcgccctcgatatggggatttttaacgacctgattttcgggtctcagtagtagttgacattagcggagcactaaaatgatccaagaacagactatgctgaacgtcgccgacaactccggtgcacgtcgcgtaatgtgtatcaaggttctgggtggctcgcaccgtcgctacgcaggcgtaggcgacatcatcaagatcaccatcaaagaagcaattccgcgtggtaaggtcaaaaaaggtgatgtgctgaaggcggtagtggtgcgcaccaagaagggtgttcgtcgcccggacggttctgtcattcgcttcgatggtaatgcttgtgttcttctgaacaacaacagcgagcagcctatcggtacgcgtatttttgggccggtaactcgtgagcttcgtagtgagaagttcatgaaaattatctctctggcaccagaagtactctaaggagcgaatcatggcagcgaaaatccgtcgtgatgacgaagttatcgtgttaaccggtaaagataaaggtaaacgcggtaaagttaagaatgtcctgtcttccggcaaggtcattgttgaaggtatcaacctggttaagaaacatcagaagccggttccggccctgaaccaaccgggtggcatcgttgaaaaagaagccgctattcaggtttccaacgtagcaatcttcaatgcggcaaccggcaaggctgaccgtgtaggctttagattcgaagacggtaaaaaagtccgtttcttcaagtctaacagcgaaactatcaagtaatttggagtagtacgatggcgaaactgcatgattactacaaagacgaagtagttaaaaaactcatgactgagtttaactacaattctgtcatgcaagtccctcgggtcgagaagatcaccctgaacatgggtgttggtgaagcgatcgctgacaaaaaactgctggataacgcagcagcagacctggcagcaatctccggtcaaaaaccgctgatcaccaaagcacgcaaatctgttgcaggcttcaaaatccgtcagggctatccgatcggctgtaaagtaactctgcgtggcgaacgcatgtgggagttctttgagcgcctgatcactattgctgtacctcgtatccgtgacttccgtggcctgtccgctaagtctttcgacggtcgtggtaactacagcatgggtgtccgtgagcagatcatcttcccagaaatcgactacgataaagtcgaccgcgttcgtggtttggatattaccattaccactactgcgaaatctgacgaagaaggccgcgctctgctggctgcctttgacttcccgttccgcaagtaaggtagggttactaaatggctaagcaatcaatgaaagcacgcgaagtaaaacgcgtagctttagctgataaatacttcgcgaaacgcgctgaactgaaagcgatcatctctgatgtgaacgcttccgacgaagatcgttggaacgctgttctcaagctgcagactctgccgcgtgattccagcccgtctcgtcagcgtaaccgctgccgtcaaacaggtcgtccgcatggtttcctgcggaagttcgggttgagccgtattaaggtccgtgaagccgctatgcgcggtgaaatcccgggtctgaaaaaggctagctggtaattgtcaccaattgaatcacgggagtaaagacagatgagcatgcaagatccgatcgcggatatgctgacccgtatccgtaacggtcaggccgcgaacaaagctgcggtcaccatgccttcctccaagctgaaagtggcaatcgccaacgtgctgaaggaagaaggttttattgaagattttaaagttgaaggcgacaccaagcctgaactggaacttactctgaagtatttccagggcaaagctgttgtagaaagcattcagcgtgtcagccgcccaggtctgcgcatctataaacgtaaagatgagctgccgaaagttatggcgggtctgggtatcgcagttgtttctacctctaaaggtgttatgactgatcgtgcagcgcgccaggctggtcttggtggcgaaattatctgctacgtagcctaatcggaggaaaaaatgtctcgtgttgctaaagcaccggtcgttgttcctgccggcgttgacgtaaaaatcaacggtcaggttattacgatcaaaggtaaaaacggcgagctgactcgtactctcaacgatgctgttgaagttaaacatgcagataataccctgaccttcggtccgcgtgatggttacgcagacggttgggcacaggctggtaccgcgcgtgccctgctgaactcaatggttatcggtgttaccgaaggcttcactaagaagctgcagctggttggtgtaggttaccgtgcagcggttaaaggcaatgtgattaacctgtctctgggtttctctcatcctgttgaccatcagctgcctgcgggtatcactgctgaatgtccgactcagactgaaatcgtgctgaaaggcgctgataagcaggtgatcggccaggttgcagcggatctgcgcgcctaccgtcgtcctgagccttataaaggcaagggtgttcgttacgccgacgaagtcgtgcgtaccaaagaggctaagaagaagtaaggtaacactatggataagaaatctgctcgtatccgtcgtgcgacccgcgcacgccgcaagctccaggagctgggcgcaactcgcctggtggtacatcgtaccccgcgtcacatttacgcacaggtaattgcaccgaacggttctgaagttctggtagctgcttctactgtagaaaaagctatcgctgaacaactgaagtacaccggtaacaaagacgcggctgcagctgtgggtaaagctgtcgctgaacgcgctctggaaaaaggcatcaaagatgtatcctttgaccgttccgggttccaatatcatggtcgtgtccaggcactggcagatgctgcccgtgaagctggccttcagttctaaggtagaggtgtaagatggctcacatcgaaaaacaagctggcgaactgcaggaaaagctgatcgcggtaaaccgcgtatctaaaaccgttaaaggtggtcgtattttctccttcacagctctgactgtagttggcgatggtaacggtcgcgttggttttggttacggtaaagcgcgtgaagttccagcagcgatccagaaagcgatggaaaaagcccgtcgcaatatgattaacgtcgcgctgaataacggcactctgcaacaccctgttaaaggtgttcacacgggttctcgcgtattcatgcagccggcttccgaaggtaccggtatcatcgccggtggtgcaatgcgcgccgttctggaagtcgctggggttcataacgttctggctaaagcctatggttccaccaacccgatcaacgtggttcgtgcaactattgatggcctggaaaatatgaattctccagaaatggtcgctgccaagcgtggtaaatccgttgaagaaattctggggaaataaaccatggcaaagactattaaaattactcaaacccgcagtgcaatcggtcgtctgccgaaacacaaggcaacgctgcttggcctgggtctgcgtcgtattggtcacaccgtagagcgcgaggatactcctgctattcgcggtatgatcaacgcggtttccttcatggttaaagttgaggagtaagagatgcgtttaaatactctgtctccggccgaaggctccaaaaaggcgggtaaacgcctgggtcgtggtatcggttctggcctcggtaaaaccggtggtcgtggtcacaaaggtcagaagtctcgttctggcggtggcgtacgtcgcggtttcgagggtggtcagatgcctctgtaccgtcgtctgccgaaattcggcttcacttctcgtaaagcagcgattacagccgaaattcgtctgtctgacctggctaaagtagaaggcggtgtagtagacctgaacacgctgaaagcggctaacattatcggtatccagatcgagttcgcgaaagtgatcctggctggcgaagtaacgactccggtaactgttcgtggcctgcgtgttactaaaggcgctcgtgctgctatcgaagctgctggcggtaaaatcgaggaataagtagcagatggctaaacaaccgggattagattttcaaagtgccaaaggtggcttaggcgagctgaaacgcagactgctgtttgttatcggtgcgctgattgtgttccgtattggctcttttattccgatccctggtattgatgccgctgtacttgccaaactgcttgagcaacagcgaggcaccatcattgagatgtttaacatgttctctggtggtgctctcagccgtgcttctatctttgctctggggatcatgccgtatatttcggcgtcgatcattatccagctgctgacggtggttcacccaacgttggcagaaattaagaaagaaggggagtctggtcgtcgtaagatcagccagtacacccgctacggtactctggtgctggcaatattccagtcgatcggtattgctaccggtctgccgaatatgcctggtatgcaaggcctggtgattaacccgggctttgcattctacttcaccgctgttgtaagtctggtcacaggaaccatgttcctgatgtggttgggcgaacagattactgaacgaggtatcggcaacggtatttcaatcattatcttcgccggtattgtcgcgggactcccgccagccattgcccatactatcgagcaagcgcgtcaaggcgacctgcacttcctcgtgttgctgttggttgcagtattagtatttgcagtgacgttctttgttgtatttgttgagcgtggtcaacgccgcattgtggtaaactacgcgaaacgtcagcaaggtcgtcgtgtctatgctgcacagagcacacatttaccgctgaaagtgaatatggcgggggtaatcccggcaatcttcgcttccagtattattctgttcccggcgaccatcgcgtcatggttcgggggcggtactggttggaactggctgacaacaatttcgctgtatttgcagcctgggcaaccgctttatgtgttactctatgcgtctgcaatcatcttcttctgtttcttctacacggcgttggttttcaacccgcgtgaaacagcagataacctgaagaagtccggtgcatttgtaccaggaattcgtccgggagagcaaacggcgaagtatatcgataaagtaatgacccgcctgaccctggttggtgcgctgtatattacctttatctgcctgatcccggagttcatgcgtgatgcaatgaaagtaccgttctacttcggtgggacctcactgcttatcgttgttgtcgtgattatggactttatggctcaagtgcaaactctgatgatgtccagtcagtatgagtctgcattgaagaaggcgaacctgaaaggctacggccgataattggtcgcccgagaagttacggagagtaaaaatgaaagttcgtgcttccgtcaagaaattatgccgtaactgcaaaatcgttaagcgtgatggtgtcatccgtgtgatttgcagtgccgagccgaagcataaacagcgccaaggctgattttttcgcatatttttcttgcaaagttgggttgagctggctagattagccagccaatcttttgtatgtctgtgcgtttccatttgagtatcctgaaaacgggcttttcagcatggaacgtacatattaaatagtaggagtgcatagtggcccgtatagcaggcattaacattcctgatcataagcatgccgtaatcgcattaacttcgatttatggcgtcggcaagacccgttctaaagccatcctggctgcagcgggtatcgctgaagatgttaagatcagtgagctgtctgaaggacaaatcgacacgctgcgtgacgaagttgccaaatttgtcgttgaaggtgatctgcgccgtgaaatcagcatgagcatcaagcgcctgatggatcttggttgctatcgcggtttgcgtcatcgtcgtggtctcccggttcgcggtcagcgtaccaagaccaacgcacgtacccgtaagggtccgcgcaaaccgatcaagaaataatcggggtgattgaataatggcaaaggcaccaattcgtgcacgtaaacgtgtaagaaaacaagtctctgacggcgtggctcatatccatgcttctttcaacaacaccatcgtgactatcactgatcgtcagggtaacgcgttgggttgggcaacagccggtggttccggtttccgtggttctcgcaaatccactccgtttgcagctcaggttgcagcagagcgttgcgctgacgccgtgaaagaatacggcatcaagaatctggaagttatggttaaaggtccgggtccaggccgcgaatctactattcgtgctctgaacgccgcaggtttccgcatcactaacattactgatgtgactccgatccctcataacggttgtcgtccgccgaaaaaacgtcgcgtataacgcctcgttttccaggtttgttggagaaagaaaatggcaagatatttgggtcctaagctcaagctgagccgtcgtgagggcaccgacttattccttaagtctggcgttcgcgcgatcgataccaagtgtaaaattgaacaagctcctggccagcacggtgcgcgtaaaccgcgtctgtctgactatggtgtgcagttgcgtgaaaagcaaaaagttcgccgtatctatggtgtgctggagcgtcagttccgtaactactacaaagaagcagcacgtctgaaaggcaacaccggtgaaaacctgttggctctgctggaaggtcgtctggacaacgttgtataccgtatgggcttcggtgccactcgtgcagaagcacgtcagctggttagccataaagcaattatggtaaacggtcgtgttgttaacatcgcttcttatcaggttagtccgaatgacgttgtaagcattcgtgagaaagcgaagaagcagtctcgcgtgaaagccgctctggagctggctgagcagcgtgaaaagccaacctggctggaagttgatgctggcaagatggaaggtacgtttaagcgtaagccggagcgttctgatctgtctgcggacattaacgaacacctgatcgtcgagctttactccaagtaaagcttagtaccaaagagaggacacaatgcagggttctgtgacagagtttctaaaaccgcgcctggttgatatcgagcaagtgagttcgacgcacgccaaggtgacccttgagcctttagagcgtggctttggccatactctgggtaacgcactgcgccgtattctgctctcatcgatgccgggttgcgcggtgaccgaggttgagattgatggtgtactacatgagtacagcaccaaagaaggcgttcaggaagatatcctggaaatcctgctcaacctgaaagggctggcggtgagagttcagggcaaagatgaagttattcttaccttgaataaatctggcattggccctgtgactgcagccgatatcacccacgacggtgatgtcgaaatcgtcaagccgcagcacgtgatctgccacctgaccgatgagaacgcgtctattagcatgcgtatcaaagttcagcgcggtcgtggttatgtgccggcttctacccgaattcattcggaagaagatgagcgcccaatcggccgtctgctggtcgacgcatgctacagccctgtggagcgtattgcctacaatgttgaagcagcgcgtgtagaacagcgtaccgacctggacaagctggtcatcgaaatggaaaccaacggcacaatcgatcctgaagaggcgattcgtcgtgcggcaaccattctggctgaacaactggaagctttcgttgacttacgtgatgtacgtcagcctgaagtgaaagaagagaaaccagagttcgatccgatcctgctgcgccctgttgacgatctggaattgactgtccgctctgctaactgccttaaagcagaagctatccactatatcggtgatctggtacagcgtaccgaggttgagctccttaaaacgcctaaccttggtaaaaaatctcttactgagattaaagacgtgctggcttcccgtggactgtctctgggcatgcgcctggaaaactggccaccggcaagcatcgctgacgagtaaccggatcacaggttaaggttttactgagaaggataaggtcatgcgccatcgtaagagtggtcgtcaactgaaccgcaacagcagccatcgccaggctatgttccgcaatatggcaggttcactggttcgtcatgaaatcatcaagacgactctgcctaaagcgaaagagctgcgccgcgtagttgagccgctgattactcttgccaagactgatagcgttgctaatcgtcgtctggcattcgcccgtactcgtgataacgagatcgtggcaaaactgtttaacgaactgggcccgcgtttcgcgagccgtgccggtggttacactcgtattctgaagtgtggcttccgtgcaggcgacaacgcgccgatggcttacatcgagctggttgatcgttcagagaaagcagaagctgctgcagagtaatctgaagcaacgtaaaaaaacccgccccggcgggtttttttatacccgtagtatccccacttatctacaatagctgtactctttttgttcatcccctggagtatttatgtggttacttgaccagtgggcagagcgccatatagcagaagcgcaagcgaaaggtgagtttgataacctggcaggtagcggcgaaccattgatactggatgatgattctcacgtgccaccggaattacgtgcggggtatcgcttgctgaagaatgccggttgcttaccgccagaacttgagcaacggagagaagcaattcagcttctggatattctcaaaggtatccgtcacgatgatccgcaatatcaagaggttagccgtcgattgtcattactggaattgaagctgcgacaagctggattgagtaccgattttttacgcggcgattatgctgacaagttgttggacaaaatcaacgataactagtggagtatgtatgtatcgcattggtgagctggcaaaaatggcggaagtaacacccgacacgattcgttattacgaaaaacagcagatgatggagcatgaagtgcgtactgaaggtgggtttcgcctatataccgaaagcgatctccagcgattgaaatttatccgccatgccagacaactaggtttcagtctggagtcgatccgcgagttgctgtcgatccgcatcgatcctgaacaccatacctgtcaggagtcaaaaggcattgtgcaggaaagattgcaggaagtcgaagcacggatagccgagttgcagagtatgcagcgttccttgcaacgccttaacgatgcctgttgtgggactgctcatagcagtgtttattgttcgattcttgaagctcttgaacaaggggcgagtggcgttaagagtggttgttgattttttgcactggcaggattacactcgcgccgttaaataaccaactggagtttttatgagtcgatatcagcatactaaagggcagataaaggataatgcgatagaagcattactacatgatcccttattccgacagcgcgtagagaaaaataagaaggggaaaggcagttacatgcgaaaaggaaaacatggcaatcgggggaactgggaggccagtggcaagaaagtaaatcacttttttaccactggtcttctgctttcaggcgcttgttaagagcggttattctgctctttcagcaaatcacgaatttctgtcagtaatacttcttctttagttggtgcaggtgcggctgctggttcttcttttttccgattcagtttgttgattagcttaatcgccataaagatggcaaaggccacaatcagaaaatcaaagacgttttgaatgaagacaccgtaatgcatcacaacagcagggatatccccctgcgcatcgcgtagcgtgacagcaaactgtttaaaatcgatcccgccaattaataagcccagaggaggcatgatgatatcggcaaccagtgaagagacaatcttcccgaatgccgcaccgataatgacacccaccgccaaatccaccacgttcccgcgcatcgcaaattcgcgaaattctttaataatgctcatgttattctccctatgaagccgacaaccataagtctaacaaatgttaagccattttcctgccaggaatgaatttaattaatccttgataatcaaagggaaataataaggcgtcattagacgccttattaattacaagaagaaagggcttggctggaagagtctttcgacgtcggtaataaactttttatctgtgaggaacataattacgtgatcgccttgctcaatgcgcagattgtcattggcaatcatcacgtcgtttccacgtaccaccgctccaataatcgttcctggcggtagcttgatttcgtcaatgactctgccgacaacgcgtgaggtgctttcatcaccgtgagcaacggcttcaatagcttctgctacgccgcggcgcaatgaggaaacaccaacaatatctgcttttcgcacatggctaagcaacgcagaaatagttgcttgttgtggtgaaatcgcaatatcgataacgctcccctgaaccagatccacataagcgcgacgctggatcaataccatcacctttttcgcacccatacgtttggcaagcatggcggacatgatattggcctcgtcatcgttggtgacggcaataaacagatcaacttgatcgatatgttcttcggccagtagttcttgatccgacgcatcaccaaaaaagacgatcgtattctgtaacttttccgccagttcggcagcgcgctgctgattacgttcgatgagtttaacgctgtaatctttttccagacgacgcgccagccctgcaccgatattaccgccaccaaccagcatgatccgcttatacggtttttccagtcgctgtaattcactcatcaccgcgcggatatgctgtgaagcggcaataaagaacacttcatcaccagcttcaacaatggtcgaaccttgcggacgaatggggcgatcgtggcggaaaattgctgccacacgagtatcgatatgtggcatatgttcgcgcatggtcgaaagtgcattaccaatcagcgggccgccataataggctttaaccacagccaggctgactttaccctcagcgaagttcaccacctgcaatgcgccgggatactcaatcagtcggtaaatattatcgataaccaactgctctggtgcgatcagatgatcaatcggcacagcatctgaatgaaatagcttatcggcatcgcgcacgtagtctggtgagcggatacgagcgatgcgattaggggtgttgaaaagtgagtaggctacctggcaggcaaccatattggtttcatctgaactggttacagcaaccagcatatcggcgtcgtcggcacctgcctcccgcaatacgcgtggatgagagccatgcccctgcacgacccgcaggtcaaatttatcctgtaaggtccgcagacgctcaccgttggtatcgacaacagtaatatcgttgttctcgccaaccaggttttccgccagtgtgccgccaacctggccggcacccagaatgataattttcatcagtcgcgacccgttatctcatcactttttgattagcttagcgtaaaagaagccgtcgccctcttcggcaccaggtagattttgtttacccggttgctctggtgttcctgtttcgcaaagttcggcatcagcggtacgttgcaaaaaggctttaatctgcaggctattctcttccggtaacaccgaacaggtggcatagaccagagttccaccggtttttaaatgcggccaaatggcgtcgagaatttcagactgcaattgcgcgagttccgggatatcgcgatcgcgacgtaaccatttaatatctggatggcgacgaatcacaccggttgctgaacaaggcgcatctaataaaatgcgatcaaactgttgctcgccacaccattgagaagggtaacggccatcaccttgtttcacggtcgccttcataccaaggcgttttaaattgtcgtaaacccgagagaggcgctgttcgtcgatatcaaccgcaacaacctgcgcttctggtgccacctcaaggatatgcgttgttttaccgccgggggcggcacaaagatccaaaatgtgttcaccgttttgtggcgcaagccaggtcatgcaaccttgtgctgatgcatcctgaacggtaacccatccgtcttcaaaaccaggtagcgcatgaacaggtgcaggtgtttccagacgtacagcatcagggtaatccgcatgcgggaaacctttcattcctgcttcatccagcaatgcaagccagctgtcgcgggaatgatgcgtacgattaatacgcagccacattggcggacgctggttattggcttcgacgatggattgccactgctctggatacgctttttgcagacgcttcagcaaccaggaaggatgcagataacgtgcatcactggcattaaactcggctaataactcttcttgctgacgctggaactggcgtaatacaccgtttatcaaccctttaagttgcggacgcttaattgcgatagcgccttcaaccgtttcagccagcgcagcatgaggtggaatgcgggtataaagcagttgatacaaaccaaccataatcaggtaatgcacggtccgctgtttgccggtcatcggacgggccattaacttattaatcagccagtctaactgcgaaagcgtacgcagtacgccaaagcacaactcttgaagaagtgctttgtctttatcggaaactttttgctggagcggtggcagaatgttgcttaatgattgcccttgctcgacgacttgttcaacggcctgggccgccatgctacgtaaattacgttgttttttcataagtataaaaacgcccggcaagaccgggcttagaagagtggactatcagaccagacggttgcccggaacaaaccattcccgacgagagttcaggaggtcttgcgcgctcatcgctttcttacccgcaggttgtaacgagagcaggttcaggatgccatcaccagtcgcaacctgaatgccttgtttgttggcttcaaggatcgttcctggtgcagcgttggttgccgtatcaatgaccgatgctttccagactttaaccggctgtccttcaatttccagccagctcattggccatggattgaaagcgcgaatgcagcgttcaagctgtgctgccgaaagtgaccagtcaatacgcgcttcttctttactcaacttctcggcgtaagtgacaagagtttcgtcctgaacttctggtttcgccgtgccgtctgccagttgtttcaacgtggtgataagcccttgtgggccaagctctgccagcttgtcgtacagcgtaccactggtatcttctgcagtaatcgggcaggagagcttatagagcatatcaccggtgtctaaaccgacatccatttgcataatggtcacaccagtttctgcatcacccgcccatagtgagcgttggattggtgcagcaccgcgccagcgtggcagcagtgaaccatgaacgttgatacagccaagacgcggcatctccagcactgctttcggcagaattaaaccataggcgacgacgaccataacatcagcctgcagttcggcgaccagttgctggttttcttgtggacgcagggaaacaggttgaaaaacgggcagacctttttcctcagccagaactttaaccgggctgggcatcagttttttaccgcgtcctgccggtcggtctggctgggtgaacacgccaacgacgttatgaccagaagacaacagcgcgtcgagatgacgcgctgcaaagtcaggtgtacccgcaaaaataatacgtagtgattctgacacgttagttcttatccttaagcccgggctttcagacgatccagtttttcaactttctgacgaatacgttgttgtttcagcggtgacagataatccataaacagtttgccgaccaggtgatccatctcatgctgaatacagatggctaacagaccgtctgcttccagttcaaatggtttaccgtcgcggtcaagggcgcgaattttaactttctctgcgcgcggcactaaagcacgttgttcagggatcgacaggcaaccttcttcaatgcctgtttcgccgcttttttctaaaagctctggattgattaacactagccgttcgtcacggttttccgaaacatcaataacaatgatacgttgatggatatcaacctgggttgccgccaggccaataccttcttctgcgtacatcgtctcgaacatatcatcgacgatacgctgaatttctgcattcacttcttctaccggtttagcaactttgcgaagccgctcgtccggaatatgtaacacttgcaaaactgacataaatctccagagatgtgttcaggagttagaaagattatttcttctattctagacaaatccccctctgattgacagcatcactgaccaatcgcaaagattgctaaggctgcttatggcagggagataaggatggtcgatacagaaatttggctgcgtttaatgagtatcagcagcttgtacggcgatgatatggtccgtatcgctcactgggtggcaaaacagtcgcatattgatgcggttgtattgcagcaaacagggcttacattgcggcaggcacaacgctttctttcatttccacgaaagagtatcgaaagctcactttgttggttggagcaacccaaccatcatttaattcctgcggacagcgaattttatcctcctcaacttctggcgacgacagattaccccggcgcactgtttgttgaaggagaactgcacgcgctgcattcatttcagcttgccgtagtggggagtcgggcgcattcatggtatggcgagcgatggggacgattattttgcgaaactctggcgacgcgtggagtgacaattacgagtggactggcgcgtggaatcgatggtgtagcgcataaagcagccttacaggtaaatggcgtcagcattgctgtattggggaatggacttaataccattcatccccgccgtcatgcccgactggctgccagtctgcttgaacaggggggcgctctcgtctcggaatttcccctcgatgttccaccccttgcttacaatttcccacgaagaaatcgcattatcagtggtctaagtaaaggtgtactggtggtggaagcggctttgcgtagtggttcgctggtgacagcacgttgtgcgcttgagcaggggcgagaagtttttgccttgccaggtccaatagggaatccgggaagcgaagggcctcactggttaataaaacaaggtgcgattcttgtgacggaaccggaagaaattctggaaaacttgcaatttggattgcactggttgccagacgcccctgaaaattcattttattcaccagatcagcaagacgtggcattgccatttcctgagctcctggctaacgtaggagatgaggtaacacctgttgacgtcgtcgctgaacgtgccggccaacctgtgccagaggtagttactcaactactcgaactggagttagcaggatggatcgcagctgtacccggcggctatgtccgattgaggagggcatgccatgttcgacgtactaatgtatttgtttgaaacctatattcacacagaagctgagttgcgtgtggatcaagacaaacttgaacaggatcttaccgacgcaggttttgagcgagaagatatctacaatgccctgctatggctggaaaaacttgctgattatcaggaagggttggcagaaccgatgcaactggcctcggatcctctctccatgcgtatttatacaccggaagagtgtgaacgactggatgccagctgccgtgggtttctgcttttccttgagcagattcaggtgctcaaccttgaaactcgtgaaatggtgatagagcgagtgctcgcgctggataacgcagagttcgaactggatgatctgaaatgggtgatcctgatggtgttgttcaatattccgggctgcgaaaatgcgtaccagcaaatggaagaattactctttgaagtgaatgaaggtatgctgcattaatcatttctttaattcagcataagttgttatggcgaaatcagcactgttcacggtgcgtaataatgagtcctgcccaaagtgcggggctgaactggttattcgatccgggaaacacggtccgtttcttggatgctcacagtatccggcgtgtgactacgtccgtcctctgaaatcttcagcggatggacatatcgtcaaagttctggaggggcaggtttgccctgcatgtggcgcaaatctggtattacgccagggacgctttggtatgtttattggttgcattaactaccctgaatgcgaacataccgaacttatcgataaaccggacgaaacagcaattacatgcccccaatgtcggacgggccatctggtccagcgccgctcccgttatggcaaaacatttcactcttgtgatcgctacccggagtgtcaatttgccattaacttcaaacccatagctggagaatgccctgagtgtcattatccgctactcatcgaaaagaaaaccgcgcagggtgtaaaacacttttgtgccagtaaacaatgtggaaagccggtttcggcggaataataacgtgaataataacctgcaaagagacgctatcgcagctgcgatagatgttctcaatgaagaacgtgtcatcgcctatccaacggaagccgttttcggtgttgggtgcgatcctgatagcgaaacagcagtgatgcgactgttggagttaaaacagcgtccggttgataaggggctgattttaatcgcagcaaattacgagcagcttaaaccctatattgatgacaccatgttgactgacgtgcagcgtgaaaccattttttcccgctggccaggtcctgtcacctttgtctttcccgcgcctgcgacaacaccgcgctggttgacgggccgctttgattcgcttgctgtacgagtcaccgaccatccgttggtggttgctttgtgccaggcttatggtaaaccgctggtttctaccagtgccaacttgagtggattgccaccttgtcgaacagtagacgaagttcgcgcacaatttggcgcggcgttcccggttgtgcctggtgaaacgggggggcgtttaaatccttcagaaatccgcgatgccctgacgggtgaactgtttcgacaggggtaacataatggaaacctatgctgtttttggtaatccgatagcccacagcaaatcgccattcattcatcagcaatttgctcagcaactgaatattgaacatccctatgggcgcgtgttggcacccatcaatgatttcatcaacacactgaacgctttctttagtgctggtggtaaaggtgcgaatgtgacggtgccttttaaagaagaggcttttgccagagcggatgagcttactgaacgggcagcgttggctggtgctgttaataccctcatgcggttagaagatggacgcctgctgggtgacaataccgatggtgtaggcttgttaagcgatctggaacgtctgtcttttatccgccctggtttacgtattctgcttatcggcgctggtggagcatctcgcggcgtactactgccactcctttccctggactgtgcggtgacaataactaatcggacggtatcccgcgcggaagagttggctaaattgtttgcgcacactggcagtattcaggcgttgagtatggacgaactggaaggtcatgagtttgatctcattattaatgcaacatccagtggcatcagtggtgatattccggcgatcccgtcatcgctcattcatccaggcatttattgctatgacatgttctatcagaaaggaaaaactccttttctggcatggtgtgagcagcgaggctcaaagcgtaatgctgatggtttaggaatgctggtggcacaggcggctcatgcctttcttctctggcacggtgttctgcctgacgtagaaccagttataaagcaattgcaggaggaattgtccgcgtgaatcaggccatccagtttccggacagggaagagtgggacgagaataaaaaatgtgtatgttttcccgctctcgtgaatggtatgcaactgacatgcgcgatctctggcgagagtctggcgtatcgctttactggagatacgccagaacagtggttagcgagttttcgtcagcatcgctgggacctggaagaagaagcggaaaacttaattcaggaacaaagtgaagatgatcaaggctgggtctggttaccctgatccagatattcgtccttccatttcacgtaattattcgcggaatagcgtaacccagccttctcttcatcacttaacgggcggatctgtttgacggggctaccgagatacagatatccgctctccagccgtttattttgtgggaccagactacccgcaccaatcatcacatcatcttctactattgcgccatcaagtaaaattgagcccatcccaaccaaaactcgattgccaatggtgcagccgtggagcatcaccttgtgaccaacagtgacatcttcgccaatggttaatgggttgccatctgggttgtacgaggatttatgagtgacatgcaacatactgccatcctggatattggtgcgtgctccgatctgtacataatgtacatctccacgaatcacaacgagcggccagatccccacatcatcagccagacgaacgtcaccaatcacgacactgctatcgtcgatcattacgcgctgaccgatttgtggaaaaagatcgcggtatgggcgtaaaacatcagacatacttacctcagcaataaatgatttactaatgactttgggggcattattggccttgtgcaagtcttttagtatgcaaaaaagcaccgttttgtgtgcgattgcagcaaaaagggtgaaaaaacaacaaacagaaaaaaagatcaaaaaaatacttgtgcaaaaaattgggatccctataatgcgcctccgttgagacgacaacgtgaaacacttcacaggatggtcggaacaacgaagagaaaaaaatcctgaaattcagggttgactctgaaagaggaaagcgtaatatacgccacctcgcgacagtgagctgaaagccgcgtcgcaactgctctttaacaatttatcagacaatctgtgtgggcactcgaagatacggattcttaacgtcgcaagacgaaaaatgaataccaagtctcaagagtgaacacgtaattcattacgaagtttaattctttgagcatcaaacttttaaattgaagagtttgatcatggctcagattgaacgctggcggcaggcctaacacatgcaagtcgaacggtaacaggaaacagcttgctgtttcgctgacgagtggcggacgggtgagtaatgtctgggaaactgcctgatggagggggataactactggaaacggtagctaataccgcataacgtcgcaagaccaaagagggggaccctcgggcctcttgccatcggatgtgcccagatgggattagcttgttggtggggtaacggctcaccaaggcgacgatccctagctggtctgagaggatgaccagccacactggaactgagacacggtccagactcctacgggaggcagcagtggggaatattgcacaatgggcgcaagcctgatgcagccatgccgcgtgtatgaagaaggccttcgggttgtaaagtactttcagcggggaggaagggagtaaagttaatacctttgctcattgacgttacccgcagaagaagcaccggctaactccgtgccagcagccgcggtaatacggagggtgcaagcgttaatcggaattactgggcgtaaagcgcacgcaggcggtttgttaagtcagatgtgaaatccccgggctcaacctgggaactgcatctgatactggcaagcttgagtctcgtagaggggggtagaattccaggtgtagcggtgaaatgcgtagagatctggaggaataccggtggcgaaggcggccccctggacgaagactgacgctcaggtgcgaaagcgtggggagcaaacaggattagataccctggtagtccacgccgtaaacgatgtcgacttggaggttgtgcccttgaggcgtggcttccggagctaacgcgttaagtcgaccgcctggggagtacggccgcaaggttaaaactcaaatgaattgacgggggcccgcacaagcggtggagcatgtggtttaattcgatgcaacgcgaagaaccttacctggtcttgacatccacggaagttttcagagatgagaatgtgccttcgggaaccgtgagacaggtgctgcatggctgtcgtcagctcgtgttgtgaaatgttgggttaagtcccgcaacgagcgcaacccttatcctttgttgccagcggtccggccgggaactcaaaggagactgccagtgataaactggaggaaggtggggatgacgtcaagtcatcatggcccttacgaccagggctacacacgtgctacaatggcgcatacaaagagaagcgacctcgcgagagcaagcggacctcataaagtgcgtcgtagtccggattggagtctgcaactcgactccatgaagtcggaatcgctagtaatcgtggatcagaatgccacggtgaatacgttcccgggccttgtacacaccgcccgtcacaccatgggagtgggttgcaaaagaagtaggtagcttaaccttcgggagggcgcttaccactttgtgattcatgactggggtgaagtcgtaacaaggtaaccgtaggggaacctgcggttggatcacctccttaccttaaagaagcgtactttgcagtgctcacacagattgtctgatgaaaatgagcagtaaaacctctacaggcttgtagctcaggtggttagagcgcacccctgataagggtgaggtcggtggttcaagtccactcaggcctaccaaatttgcacggcaaatttgaagaggttttaactacatgttatggggctatagctcagctgggagagcgcctgctttgcacgcaggaggtctgcggttcgatcccgcatagctccaccatctctgtagtgattaaataaaaaatacttcagagtgtacctgcaaaggttcactgcgaagttttgctctttaaaaatctggatcaagctgaaaattgaaacactgaacaacgaaagttgttcgtgagtctctcaaattttcgcaactctgaagtgaaacatcttcgggttgtgaggttaagcgactaagcgtacacggtggatgccctggcagtcagaggcgatgaaggacgtgctaatctgcgataagcgtcggtaaggtgatatgaaccgttataaccggcgatttccgaatggggaaacccagtgtgtttcgacacactatcattaactgaatccataggttaatgaggcgaaccgggggaactgaaacatctaagtaccccgaggaaaagaaatcaaccgagattcccccagtagcggcgagcgaacggggagcagcccagagcctgaatcagtgtgtgtgttagtggaagcgtctggaaaggcgcgcgatacagggtgacagccccgtacacaaaaatgcacatgctgtgagctcgatgagtagggcgggacacgtggtatcctgtctgaatatggggggaccatcctccaaggctaaatactcctgactgaccgatagtgaaccagtaccgtgagggaaaggcgaaaagaaccccggcgaggggagtgaaaaagaacctgaaaccgtgtacgtacaagcagtgggagcacgcttaggcgtgtgactgcgtaccttttgtataatgggtcagcgacttatattctgtagcaaggttaaccgaataggggagccgaagggaaaccgagtcttaactgggcgttaagttgcagggtatagacccgaaacccggtgatctagccatgggcaggttgaaggttgggtaacactaactggaggaccgaaccgactaatgttgaaaaattagcggatgacttgtggctgggggtgaaaggccaatcaaaccgggagatagctggttctccccgaaagctatttaggtagcgcctcgtgaattcatctccgggggtagagcactgtttcggcaagggggtcatcccgacttaccaacccgatgcaaactgcgaataccggagaatgttatcacgggagacacacggcgggtgctaacgtccgtcgtgaagagggaaacaacccagaccgccagctaaggtcccaaagtcatggttaagtgggaaacgatgtgggaaggcccagacagccaggatgttggcttagaagcagccatcatttaaagaaagcgtaatagctcactggtcgagtcggcctgcgcggaagatgtaacggggctaaaccatgcaccgaagctgcggcagcgacgcttatgcgttgttgggtaggggagcgttctgtaagcctgcgaaggtgtgctgtgaggcatgctggaggtatcagaagtgcgaatgctgacataagtaacgataaagcgggtgaaaagcccgctcgccggaagaccaagggttcctgtccaacgttaatcggggcagggtgagtcgacccctaaggcgaggccgaaaggcgtagtcgatgggaaacaggttaatattcctgtacttggtgttactgcgaaggggggacggagaaggctatgttggccgggcgacggttgtcccggtttaagcgtgtaggctggttttccaggcaaatccggaaaatcaaggctgaggcgtgatgacgaggcactacggtgctgaagcaacaaatgccctgcttccaggaaaagcctctaagcatcaggtaacatcaaatcgtaccccaaaccgacacaggtggtcaggtagagaataccaaggcgcttgagagaactcgggtgaaggaactaggcaaaatggtgccgtaacttcgggagaaggcacgctgatatgtaggtgaggtccctcgcggatggagctgaaatcagtcgaagataccagctggctgcaactgtttattaaaaacacagcactgtgcaaacacgaaagtggacgtatacggtgtgacgcctgcccggtgccggaaggttaattgatggggttagcgcaagcgaagctcttgatcgaagccccggtaaacggcggccgtaactataacggtcctaaggtagcgaaattccttgtcgggtaagttccgacctgcacgaatggcgtaatgatggccaggctgtctccacccgagactcagtgaaattgaactcgctgtgaagatgcagtgtacccgcggcaagacggaaagaccccgtgaacctttactatagcttgacactgaacattgagccttgatgtgtaggataggtgggaggctttgaagtgtggacgccagtctgcatggagccgaccttgaaataccaccctttaatgtttgatgttctaacgttgacccgtaatccgggttgcggacagtgtctggtgggtagtttgactggggcgatctcctcctaaagagtaacggaggagcacgaaggttggctaatcctggtcggacatcaggaggttagtgcaatggcataagccagcttgactgcgagcgtgacggcgcgagcaggtgcgaaagcaggtcatagtgatccggtggttctgaatggaagggccatcgctcaacggataaaaggtactccggggataacaggctgataccgcccaagagttcatatcgacggcggtgtttggcacctcgatgtcggctcatcacatcctggggctgaagtaggtcccaagggtatggctgttcgccatttaaagtggtacgcgagctgggtttagaacgtcgtgagacagttcggtccctatctgccgtgggcgctggagaactgaggggggctgctcctagtacgagaggaccggagtggacgcatcactggtgttcgggttgtcatgccaatggcactgcccggtagctaaatgcggaagagataagtgctgaaagcatctaagcacgaaacttgccccgagatgagttctccctgactccttgagagtcctgaaggaacgttgaagacgacgacgttgataggccgggtgtgtaagcgcagcgatgcgttgagctaaccggtactaatgaaccgtgaggcttaaccttacaacgccgaaggtgttttggcggattgagagaagattttcagcctgatacagattaaatcagaacgcagaagcggtctgataaaacagaatttgcctggcggcagtagcgcggtggtcccacctgaccccatgccgaactcagaagtgaaacgccgtagcgccgatggtagtgtggggtctccccatgcgagagtagggaactgccaggcatcaaattagaaaaaccccggtccataaggccggggttttttgcatatcaattatttgcatgatgaagggaatctcatgtcagttctgtatatccaaattcgtcgtaatcaaattactgttcgcgatcttgaaagcaaacgtgaagtgtcaggagacgctgccttcagtaaccagcgcctgttaatcgccaatttctttgttgcagaaaaagttctgcaagatcttgttctgcaactccacccacgttcaacctggcattcttttttgccagcaaaacgtatggatattgttgtgagcgcactggaaatgaatgagggcggtttgtcacaggttgaggaacgcattctccatgaagtggtcgctggggcaacgttaatgaaatatcgccagttccacatccatgcgcaatcagcggtactcagtgatagtgcggtcatggcaatgcttaagcagaaataatcgtgtcaccattggtgggtactaaacctgaagttcagcccaccgggatgagaaaaaatcgcctacgcccccacatacgccagattcagcaacggatacggtttccccaaatcgtccacctcagagcgtcccgtaaccttaaaacccaccttcttatagaacccaaccgcctgctcattttgctcattaacgttggttgtcagttccggtgccatcgagagcgcatgctccaccagcacccgacctacgccgcagccgcgcacatcaggatcgataaacagcgcatccatatgctgcccacttagcaacataaatccaaccggctgatcccgctcattaaccgcgacccacaacggcgcttccggcaggaaggaacgaactaggtcctccagctcggtccgatactctgctgatagaaaatcgtgagtggcatcgacagaacgacaccaaatcgcaacgagttcctccccttcctcatgccgtgagcggcgaatactaataaccattttctctccttttagtcattcttatattctaacgtagtcttttccttgaaactttctcaccttcaacatgcaggctcgacattggcaaattttctggttatcttcagctatctggatgtctaaacgtataagcgtatgtagtgaggtaatcaggttatgccgattcgtgtgccggacgagctacccgccgtcaatttcttgcgtgaagaaaacgtctttgtgatgacaacttctcgtgcgtctggtcaggaaattcgtccacttaaggttctgatccttaacctgatgccgaagaagattgaaactgaaaatcagtttctgcgcctgctttcaaactcacctttgcaggtcgatattcagctgttgcgcatcgattcccgtgaatcgcgcaacacgcccgcagagcatctgaacaacttctactgtaactttgaagatattcaggatcagaactttgacggtttgattgtaactggtgcgccgctgggcctggtggagtttaatgatgtcgcttactggccgcagatcaaacaggtgctggagtggtcgaaagatcacgtcacctcgacgctgtttgtctgctgggcggtacaggccgcgctcaatatcctctacggcattcctaagcaaactcgcaccgaaaaactctctggcgtttacgagcatcatattctccatcctcatgcgcttctgacgcgtggctttgatgattcattcctggcaccgcattcgcgctatgctgactttccggcagcgttgattcgtgattacaccgatctggaaattctggcagagacggaagaaggggatgcatatctgtttgccagtaaagataagcgcattgcctttgtgacgggccatcccgaatatgatgcgcaaacgctggcgcaggaatttttccgcgatgtggaagccggactagacccggatgtaccgtataactatttcccgcacaatgatccgcaaaatacaccgcgagcgagctggcgtagtcacggtaatttactgtttaccaactggctcaactattacgtctaccagatcacgccatacgatctacggcacatgaatccaacgctggattaatcttctgtgatagtcgatcgttaagcgattcagcaccttacctcaggcaccttcgggtgccttttttatttccgaaacgtacctcagcaggtgaataaattttattcatattgttatcaacaagttatcaagtatttttaattaaaatggaaattgtttttgattttgcattttaaatgagtagtcttagttgtgctgaacgaaaagagcacaacgatccttcgttcacagtggggaagttttcggatccatgacgaggagctgcacgatgactgaacaggcaacaacaaccgatgaactggctttcacaaggccgtatggcgagcaggagaagcaaattcttactgccgaagcggtagaatttctgactgagctggtgacgcattttacgccacaacgcaataaacttctggcagcgcgcattcagcagcagcaagatattgataacggaacgttgcctgattttatttcggaaacagcttccattcgcgatgctgattggaaaattcgcgggattcctgcggacttagaagaccgccgcgtagagataactggcccggtagagcgcaagatggtgatcaacgcgctcaacgccaatgtgaaagtctttatggccgatttcgaagattcactggcaccagactggaacaaagtgatcgacgggcaaattaacctgcgtgatgcggttaacggcaccatcagttacaccaatgaagcaggcaaaatttaccagctcaagcccaatccagcggttttgatttgtcgggtacgcggtctgcacttgccggaaaaacatgtcacctggcgtggtgaggcaatccccggcagcctgtttgattttgcgctctatttcttccacaactatcaggcactgttggcaaagggcagtggtccctatttctatctgccgaaaacccagtcctggcaggaagcggcctggtggagcgaagtcttcagctatgcagaagatcgctttaatctgccgcgcggcaccatcaaggcgacgttgctgattgaaacgctgcccgccgtgttccagatggatgaaatccttcacgcgctgcgtgaccatattgttggtctgaactgcggtcgttgggattacatcttcagctatatcaaaacgttgaaaaactatcccgatcgcgtcctgccagacagacaggcagtgacgatggataaaccattcctgaatgcttactcacgcctgttgattaaaacctgccataaacgcggtgcttttgcgatgggcggcatggcggcgtttattccgagcaaagatgaagagcacaataaccaggtgctcaacaaagtaaaagcggataaatcgctggaagccaataacggtcacgatggcacatggatcgctcacccaggccttgcggacacggcaatggcggtattcaacgacattctcggctcccgtaaaaatcagcttgaagtgatgcgcgaacaagacgcgccgattactgccgatcagctgctggcaccttgtgatggtgaacgcaccgaagaaggtatgcgcgccaacattcgcgtggctgtgcagtacatcgaagcgtggatctctggcaacggctgtgtgccgatttatggcctgatggaagatgcggcgacggctgaaatttcccgtacctcgatctggcagtggatccatcatcaaaaaacgttgagcaatggcaaaccggtgaccaaagccttgttccgccagatgctgggcgaagagatgaaagtcattgccagcgaactgggcgaagaacgtttctcccaggggcgttttgacgatgccgcacgcttgatggaacagatcaccacttccgatgagttaattgatttcctgaccctgccaggctaccgcctgttagcgtaaaccaccacataactatggagcatctgcacatgaaaacccgtacacaacaaattgaagaattacagaaagagtggactcaaccgcgttgggaaggcattactcgcccatacagtgcggaagatgtggtgaaattacgcggttcagtcaatcctgaatgcacgctggcgcaactgggcgcagcgaaaatgtggcgtctgctgcacggtgagtcgaaaaaaggctacatcaacagcctcggcgcactgactggcggtcaggcgctgcaacaggcgaaagcgggtattgaagcagtctatctgtcgggatggcaggtagcggcggacgctaacctggcggccagcatgtatccggatcagtcgctctatccggcaaactcggtgccagctgtggtggagcggatcaacaacaccttccgtcgtgccgatcagatccaatggtccgcgggcattgagccgggcgatccgcgctatgtcgattacttcctgccgatcgttgccgatgcggaagccggttttggcggtgtcctgaatgcctttgaactgatgaaagcgatgattgaagccggtgcagcggcagttcacttcgaagatcagctggcgtcagtgaagaaatgcggtcacatgggcggcaaagttttagtgccaactcaggaagctattcagaaactggtcgcggcgcgtctggcagctgacgtgacgggcgttccaaccctgctggttgcccgtaccgatgctgatgcggcggatctgatcacctccgattgcgacccgtatgacagcgaatttattaccggcgagcgtaccagtgaaggcttcttccgtactcatgcgggcattgagcaagcgatcagccgtggcctggcgtatgcgccatatgctgacctggtctggtgtgaaacctccacgccggatctggaactggcgcgtcgctttgcacaagctatccacgcgaaatatccgggcaaactgctggcttataactgctcgccgtcgttcaactggcagaaaaacctcgacgacaaaactattgccagcttccagcagcagctgtcggatatgggctacaagttccagttcatcaccctggcaggtatccacagcatgtggttcaacatgtttgacctggcaaacgcctatgcccagggcgagggtatgaagcactacgttgagaaagtgcagcagccggaatttgccgccgcgaaagatggctataccttcgtatctcaccagcaggaagtgggtacaggttacttcgataaagtgacgactattattcagggcggcacgtcttcagtcaccgcgctgaccggctccactgaagaatcgcagttctaagcaacaacaaccgttgctgactgtaggccggataaggcgttcacgccgcatccggcaatcggtgcacgatgcctgatgcgacgcttgcgcgtcttatcatgcctacagccgttgccgaacgtaggctggataaggcgtttacgccgcatccggcaattctctgctcctgatgagggcgctaaatgccgcgtggcctggaattattgattgctcaaaccattttgcaaggcttcgatgctcagtatggtcgattcctcgaagtgacctccggtgcgcagcagcgtttcgaacaggccgactggcatgctgtccagcaggcgatgaaaaaccgtatccatctttacgatcatcacgttggtctggtcgtggagcaactgcgctgcattactaacggccaaagtacggacgcggcatttttactacgtgttaaagagcattacacccggctgttgccggattacccgcgcttcgagattgcggagagcttttttaactccgtgtactgtcggttatttgaccaccgctcgcttactcccgagcggctttttatctttagctctcagccagagcgccgctttcgtaccattccccgcccgctggcgaaagactttcaccccgatcacggctgggaatctctactgatgcgcgttatcagcgacctaccgctgcgcctgcgctggcagaataaaagccgtgacatccattacattattcgccatctgacggaaacgctggggacagacaacctcgcggaaagtcatttacaggtggcgaacgaactgttttaccgcaataaagccgcctggctggtaggcaaactgatcacaccttccggcacattgccatttttgctgccgatccaccagacggacgacggcgagttatttattgatacctgcctgacgacgaccgccgaagcgagcattgtttttggctttgcgcgttcttattttatggtttatgcgccgctgcccgcagcgctggtcgagtggctacgggaaattctgccaggtaaaaccaccgctgaattgtatatggctatcggctgccagaagcacgccaaaaccgaaagctaccgcgaatatctcgtttatctacagggctgtaatgagcagttcattgaagcgccgggtattcgtggaatggtgatgttggtgtttacgctgccgggctttgatcgggtattcaaagtcatcaaagacaggttcgcgccgcagaaagagatgtctgccgctcacgttcgtgcctgctatcaactggtgaaagagcacgatcgcgtgggccgaatggcggacacccaggagtttgaaaactttgtgctggagaagcggcatatttccccggcattaatggaattactgcttcaggaagcagcggaaaaaatcaccgatctcggcgaacaaattgtgattcgccatctttatattgagcggcggatggtgccgctcaatatctggctggaacaagtggaaggtcagcagttgcgcgacgccattgaagaatacggtaacgctattcgccagcttgccgctgctaacattttccctggcgacatgctgtttaaaaacttcggtgtcacccgtcacgggcgtgtggttttttatgattacgatgaaatttgctacatgacggaagtgaatttccgcgacatcccgccgccgcgctatccggaagacgaacttgccagcgaaccgtggtacagcgtctcgccgggcgatgttttcccggaagagtttcgccactggctatgcgccgacccgcgtattggtccgctgtttgaagagatgcacgccgacctgttccgcgctgattactggcgcgcactacaaaaccgcatacgtgaagggcatgtggaagatgtttatgcgtatcggcgcaggcaaagatttagcgtacggtatggggagatgcttttttgagtaaagcttccatataatttttctccgcaatgtatcgagggttatccgtaaagccaaagctttcagccatcttatttaatgtattaaggattaattcagcaataacccggtgaccaaattcaaaagccaactcaaaggcagagtatttttgtggggctttgtgttgccaaaaatccataatatcttcagcggtaaatccaaacaggcgtgcatggtcagataaagcaagataaaccgtctctacaacattttgttgtttatgctgtatcgctgaaaacaaaccgggatattcattagaattatttgccaggaggaggggcttcatattttttttatcgaatttaaacgtattaaacagagtgggtaatgcgttaaaaatagtattaataacgttcatgtgtccgcgctgcatggccataaacaaacccgtgtcgcgcgcaagacttttagcggtcagaagatctacaatatcggaagctgaaatgttaatttcctgggctaggctgggcaatgcttcaagaataactttcacgatatcgctatgtccattttgcatcgccagatatagtcctgggcaaccataaaaatcctttgccttcaggagatcgagtacctgttctttagtcaaatgacatgtgcgaattaacaaaggtaacgcgttcaaaacaattttcagcatgtcggcatcaccattcgccataacatggtataaaacatggctggacgttctatttttggcactcaggaatttatacacttgttcgttatctaaatgatgtgttgcggccagtttaggtaaggcgttcagaatcgaggttacaacatttttatccttacgtgatatcgctaaaaataatccagaaaaaccatttttatcttttgcctccagaatatgcatgagattttttttcgagagtaatccttcatatcctgtttctgacaatgaattgaaaatagtctcaacgatatccgcattaccataatttatagccaaatataaacctggcaggttaatactattataggcagtcaacatttctgttctatgtagttctggcattttctggagttgaatcatcagttgcgtaagttggtgattctgaccaattgccattagcaaattcatcgttgcaggtgataatggaggggttatttcatccacagatccttttaacatcaatagctgttctttcggaagtgctggaattattgcaacagattgattaataacatgatcatttgaccatttcaggaggctataatctacattcataaaatccatcagagaatagtgtttaatattctctttgctttcgctcataattcttattttatcgttagttacattaggatcataaaccgaaaccacgtaatgggtacatccttcagttgtgttctttattcttagccggaccgtcaaagcatggttatccaccagtaatatggctgccataacactgatgccatttgattccatcttgtcaaaatatgctttcataactagcccgaaatcaccgcaggcagcaacgcaacgcccctcaggacggctggaaaccaacgccaaagtctggtttttgcattttttgttgaagtgcgtgagaaatttttcagctgaagagtaatcatcttgatggggtttgtaatcaacattctgataaatatcattaatatattgtgcagcaatgtgtcggcatactatacggttttggggtcgccccggaaaataacattgaccattaagtttaattcttgggaattctttttcttttctatctgattttaggtttaattcttgtttatcaagagtgtctgagcgttgaggtaaaatttccattaggtatttttcaaatattggggcaatggtttgagtaagtgtcgtgttttcgtttttattaattatcgtaatttctttcttatcagcttgtaagacggacgtggaaaatttaatgacaaaatccttgttgctaaagatatgacgaccattttgtctacagttctctgagaagctttttaatagaggcgtcgccagctccttgccagaaaatttatcctcgagttctttataaaacaattcactcagggtttggtgttcatttgtctgggctgtattattaatatttgcagagaaagaactacgaggaatacgagtaatcatttaaatatctcattgtttattgatgtcttgaattttaactatcagaacagtgaaaaaatttaatatgattacaactaaagaaatatcataaatcgctcaatctcataatgcagccgtaaaagtttcggtggaatgagatcttgcgattttgttaataattaagtggtttgatgtttaaaaataatgctgagttaataaaagtgtgtgaagtgtatgacattaagttattttggcgtcaatgcgattaacagacacccttattctattgccactcaggtatgatgggcagaatattgcctctgcccgccagaaaaagtcagcgcattccaccgtacgccagcgtcacttccttcgccgctttaatcaccatcgcgccaaactcggtcacgcggtcatcggtaatacgtgaaatcggtccggaaatagaaattgcggcaaacggttcacggtgctcatcgaaaatacacgctgcaaggcaacgtagccccagtgcatgttcctcatcgtcaaatgaataaccccgtttgcgcgtttgggcgagatcttcttttaaatgcacaggagacaccagcgttgcgtgggtataggcatgtaaccctttgcggtgcagcagcttcgtcacctgttcttcgctcagttgggctaaaaaggctttacccgcaccggaagcgtgcatcggcaatttaccgccgataggcgcggacattcgcatcagatgcgtacactgtacctggtcgataataatcgcttcgtgatcgctttgatcaagcaccgccatattgaccgtttcgccagactcttccattagattgcgcaggatagggtgaacaatcgctaacaaattacggctctggagaaagctgctgccgaccataaaggcatgtgcgccgattgcccaatgtcccagttcgccaacctgacgcacgaaaccctgctgttgcatcgtggttagcaggcggtgggtcgtggaattgggtaacccggcttgttgcgccagttccgtgagtgccacactgccattggattcggcaatccactccagtaatttcaggccacgcgttaaagactgaacctgtccagtcgctggtgcggtggcaacggcgggttttctgccgcgtttcgcgggaatgggtgcgaccatgacagtctcttttttctgtatcgtggaaatcattttcatttttattgttagctaatgcaatagttactgaactgatccgatgagttaatgttgaacaaatctcatgttgcgtggtggtcgcttttaccacagatgcgtttatgccagtatggtttgttgaatttttattaaatctgggttgagcgtgtcgggagcaagtgtgagcagcaaagtggaacaactgcgtgcgcagttaaatgaacgtattctggtgctggacggcggtatgggcaccatgatccagagttatcgactgaacgaagccgattttcgtggtgaacgctttgccgactggccatgcgacctcaaaggcaacaacgacctgctggtactcagtaaaccggaagtgatcgccgctatccacaacgcctactttgaagcgggcgcggatatcatcgaaaccaacaccttcaactccacgaccattgcgatggcggattaccagatggaatccctgtcggcggaaatcaactttgcggcggcgaaactggcgcgagcttgtgctgacgagtggaccgcgcgcacgccagagaaaccgcgctacgttgccggtgttctcggcccgaccaaccgcacggcgtctatttctccggacgtcaacgatccggcatttcgtaatatcacttttgacgggctggtggcggcttatcgagagtccaccaaagcgctggtggaaggtggcgcggatctgatcctgattgaaaccgttttcgacacccttaacgccaaagcggcggtatttgcggtgaaaacggagtttgaagcgctgggcgttgagctgccgattatgatctccggcaccatcaccgacgcctccgggcgcacgctctccgggcagaccaccgaagcattttacaactcattgcgccacgccgaagctctgacctttggcctgaactgtgcgctggggcccgatgaactgcgccagtacgtgcaggagctgtcacggattgcggaatgctacgtcaccgcgcacccgaacgccgggctacccaacgcctttggtgagtacgatctcgacgccgacacgatggcaaaacagatacgtgaatgggcgcaagcgggttttctcaatatcgtcggcggctgctgtggcaccacgccacaacatattgcagcgatgagtcgtgcagtagaaggattagcgccgcgcaaactgccggaaattcccgtagcctgccgtttgtccggcctggagccgctgaacattggcgaagatagcctgtttgtgaacgtgggtgaacgcaccaacgtcaccggttccgctaagttcaagcgcctgatcaaagaagagaaatacagcgaggcgctggatgtcgcgcgtcaacaggtggaaaacggcgcgcagattatcgatatcaacatggatgaagggatgctcgatgccgaagcggcgatggtgcgttttctcaatctgattgccggtgaaccggatatcgctcgcgtgccgattatgatcgactcctcaaaatgggacgtcattgaaaaaggtctgaagtgtatccagggcaaaggcattgttaactctatctcgatgaaagagggcgtcgatgcctttatccatcacgcgaaattgttgcgtcgctacggtgcggcagtggtggtaatggcctttgacgaacagggacaggccgatactcgcgcacggaaaatcgagatttgccgtcgggcgtacaaaatcctcaccgaagaggttggcttcccgccagaagatatcatcttcgacccaaacatcttcgcggtcgcaactggcattgaagagcacaacaactacgcgcaggactttatcggcgcgtgtgaagacatcaaacgcgaactgccgcacgcgctgatttccggcggcgtatctaacgtttctttctcgttccgtggcaacgatccggtgcgcgaagccattcacgcagtgttcctctactacgctattcgcaatggcatggatatggggatcgtcaacgccgggcaactggcgatttacgacgacctacccgctgaactgcgcgacgcggtggaagatgtgattcttaatcgtcgcgacgatggcaccgagcgtttactggagcttgccgagaaatatcgcggcagcaaaaccgacgacaccgccaacgcccagcaggcggagtggcgctcgtgggaagtgaataaacgtctggaatactcgctggtcaaaggcattaccgagtttatcgagcaggataccgaagaagcccgccagcaggctacgcgcccgattgaagtgattgaaggcccgttgatggacggcatgaatgtggtcggcgacctgtttggcgaagggaaaatgttcctgccacaggtggtcaaatcggcgcgcgtcatgaaacaggcggtggcctacctcgaaccgtttattgaagccagcaaagagcagggcaaaaccaacggcaagatggtgatcgccaccgtgaagggcgacgtccacgacatcggtaaaaatatcgttggtgtggtgctgcaatgtaacaactacgaaattgtcgatctcggcgttatggtgcctgcggaaaaaattctccgtaccgctaaagaagtgaatgctgatctgattggcctttcggggcttatcacgccgtcgctggacgagatggttaacgtggcgaaagagatggagcgtcagggcttcactattccgttactgattggcggcgcgacgacctcaaaagcgcacacggcggtgaaaatcgagcagaactacagcggcccgacggtgtatgtgcagaatgcctcgcgtaccgttggtgtggtggcggcgctgctttccgatacccagcgtgatgattttgtcgctcgtacccgcaaggagtacgaaaccgtacgtattcagcacgggcgcaagaaaccgcgcacaccaccggtcacgctggaagcggcgcgcgataacgatttcgcttttgactggcaggcttacacgccgccggtggcgcaccgtctcggcgtgcaggaagtcgaagccagcatcgaaacgctgcgtaattacatcgactggacaccgttctttatgacctggtcgctggccgggaagtatccgcgcattctggaagatgaagtggtgggcgttgaggcgcagcggctgtttaaagacgccaacgacatgctggataaattaagcgccgagaaaacgctgaatccgcgtggcgtggtgggcctgttcccggcaaaccgtgtgggcgatgacattgaaatctaccgtgacgaaacgcgtacccatgtgatcaacgtcagccaccatctgcgtcaacagaccgaaaaaacaggcttcgctaactactgtctcgctgacttcgttgcgccgaagctttctggtaaagcagattacatcggcgcatttgccgtgactggcgggctggaagaggacgcactggctgatgcctttgaagcgcagcacgatgattacaacaaaatcatggtgaaagcgcttgccgaccgtttagccgaagcctttgcggagtatctccatgagcgtgtgcgtaaagtctactggggctatgcgccgaacgagaacctcagcaacgaagagctgatccgcgaaaactaccagggcatccgtccggcaccgggctatccggcctgcccggaacatacggaaaaagccaccatctgggagctgctggaagtggaaaaacacactggcatgaaactcacagaatctttcgccatgtggcccggtgcatcggtttcgggttggtacttcagccacccggacagcaagtactacgctgtagcacaaattcagcgcgatcaggttgaagattatgcccgccgtaaaggtatgagcgttaccgaagttgagcgctggctggcaccgaatctggggtatgacgcggactgattcacaaatctgtcacttttccttacaacaaacagggcgctcaatgagtgccctgtctctttattaatatgaaacacttatactggaaacaggctggaataatcttagccggaaaaacgaatgtcaaaaggcacagtaaagatgccagtcagcgtgtttccggtcctttggtcattcaattgcttcaggaacatataacgataaggagaacctgaactcgtgttaacgctgcttcacctgctttctgccgtcgccctgctggtctgggggactcatattgttcgaaccggcgtaatgcgcgtcttcggcgcgcgtttgcgtactgtccttagccggagcgtcgaaaaaaagccgctcgccttttgcgcggggatcggcgttaccgcactggtacagagcagtaatgccaccaccatgctggtgacctcgtttgtcgctcaggatctggtagccctcgcaccggctctggtcattgtgctgggtgcagatgtcgggacggcgctaatggcgcgtattctcaccttcgacttatcctggctgtcaccgttacttatttttatcggcgtgatttttttcctcggacgcaaacagtcacgcgccgggcaactgggccgcgtcggtattggtcttgggctgattttgctagcgctggagttgattgtgcaggccgtaacgccgatcacccaggcaaacggcgttcaggtgatctttgcctcgctgaccggcgatattctgctggatgcgctgattggcgcgatgttcgccattatcagctactccagccttgctgctgtactgctgaccgcgactctgaccgccgcaggcattatctccttccccgtggcgctctgtctggtgattggtgctaacctcggttccggtctgctggcaatgctcaacaacagtgccgccaatgccgcagcccgccgtgtcgcgctgggtagtctgctgtttaagctggtgggtagcctgattatcctgccgtttgtccatttgctggcagagacaatggggaagttgtcattgccaaaagcggaactggtgatctatttccacgtcttctacaaccttgtacgttgcctggtcatgctgccatttgttgacccgatggcacggttttgcaaaacgattattcgcgatgaaccggaactggatacccagctacggcctaaacatctggatgtcagcgcgctggatacgcccacgcttgctctggcgaacgccgcgcgcgaaaccctgcgcattggcgacgccatggaacagatgatggaagggttgaataaagtgatgcacggtgagccacggcaggagaaagagctgcgtaagctggcagatgatatcaacgttctctacaccgccattaagctgtatctggcgcggatgccaaaagaagagctggcggaggaagagtcgcgccgctgggcagagatcatcgaaatgtcgctcaaccttgaacaggcctccgatatcgtcgagcgcatgggcagcgaaattgctgacaaatcactggcagcacggcgggcattttcgcttgatgggttgaaggaactggatgcgctctatgagcaattgctcagtaatttaaagctggcaatgtcggtgttcttctctggcgatgtcaccagcgctcgtcgtttgcgtcgcagcaaacatcgttttcgcattcttaatcgccgctattcccacgcccacgtcgatcgcctgcatcagcaaaacgtgcagagcattgaaaccagttcgctacatttaggcttactgggagatatgcagcgcctgaactcgctgttttgttcggtggcttacagtgtgctggaacagccggatgaagatgaaggacgggacgagtattaatattgtgaatcctgtaggcctgataagacgcgtcaagcgtcgcatcaggcactatgaacaagatgccggatcatgcatccggcaattcacttaaaaacggtgaccagcttccagcggaaccgcttcttcaccagccttaaacacataagtggtgttcgggccacccagcgtagcgtgacctttactcactgtgatccagttaccttccggtagaccaataatcgtcagttctggcgcgacgaccagcagttcgcgaatacgctgctcacgggtttcacctttatggccttccggcagcgcgttggtgaagtgcgggttgatttgcagcgggaacagatttagcgcatcgaaaccttgcggatcgacaatcggcatatcgttggtggtacgaatagttgggcaagcaaggttagcgcctgcgctccagccaatatacagagcgccacgtttaaccacgtcagtaattggtgccagcagcccgcgctcgcggcactgtttcagcaactggaaagtattcccgccgccgacaatcacgatctcagcattttcaatcgcggcaacgggatcgacaacgctatgaataccggtgacagaaacacccagcggagcgagaaccgcagccgttttcgctgtgtaatcatcccaggtctgcgttacgccagcgaaagggataaacaccgctgagcggcgaccctgcaactgttcagcaattagcggcagtgcatgttccagccaggctttacccggcagcgtcgagttactcaataaaagcagttccattacttctccggttagtaagaaatcacgggaggcatgctaccactgcgaatttaaccacttactgacatggctcacgatgtcgcacattgcttctggaaagtgatttgagcaggtaacgaattcaagccaatggaaataacaaatagttcgctcatgactattttttatcaacccaaaggtacggtatattccgttttttacaggagaatttatgctgcccgactcatcagtccgtttaaataaatacatcagcgaaagcggaatttgctcacgccgcgaagcggatcgctatatcgagcaaggcaatgtgttccttaatggcaagcgagccaccattggcgatcaggtgaaacccggcgacgttgtgaaagtaaacggtcagttgattgaacctcgggaagccgaagatttggtacttatcgccctgaacaagcccgttggtattgtaagcaccaccgaagatggcgagcgcgataacattgtcgatttcgttaaccacagcaaacgcgtgttcccgattggccgcctggataaagactcccaggggctgattttcctcaccaatcacggcgatctggtgaataagatcctgcgtgctggcaatgatcatgagaaagagtatctggtgacggtcgataaaccgattaccgaggagtttattcgcggcatgagtgcgggggtgccaatcctcgggacagtgaccaaaaagtgcaaagttaaaaaagaagcgccgtttgtcttccgcattaccctggtgcaggggctgaaccgtcagatccggcgcatgtgcgagcatttcggctatgaagtgaaaaagctggaacgcacgcgcatcatgaacgttagcttaagcggcattccgctgggggaatggcgcgatttaaccgacgatgagttaatcgacctctttaagctcattgaaaattcctcttccgaggtaaaacctaaagcgaaggccaaaccgaaaacagcgggcatcaaacgtccagtcgttaagatggaaaaaacggcggaaaaaggcggtcgcccggcgtccaacggtaagcgttttacctcgccggggcgtaaaaagaaggggcgctgattaacgcctcagactgatgaaaacggcccaaaagtgcccggacagtcccctcgccccttcgggaaaagggttagggtgaggggaaaattgtgttcacactgacgagtgaaaatctcaggcgttgattgtggattagcgcctgccgcgcgtcgacgtatttgctgaccagctaaatgacgcttcaggatccggtttataagcctgctttttcttcaactggcgggcttttttcgcttcagcctcacgctcaaccattaatttatcgatgtaatctttcttaatgctgttggtttcggagttggtcaatacgcgaccatgcgcaatccgcgcccgatccagcagtgttttaagttcacgctgctcgcgttcagtcatctctttttgggtaatacgggggagtgccatgatggtgccctcagtgagccagagagttcagtgtacgggaattcgtttgcgagcagaactgataatattcattttgccttctcttaactatttatctctttcgataattaattagagatgcagataaaaaaattaaaggcaattattctccgataaagacgctggttaacagagtacaggctcgtttattgatgagcatagtgacaagaaaatcaatacggcccgaaatatagcttccaggccatacagtatttactcaaacaaattactatgcagtttttgcaccacctgctcggcatcttcgccgggcaccaggaagcacaggttatggctggatgcgccataacaaatcatgcgaatgttgaacggttccagtacgccgaatacctctttgccaacgccgcaggcttttgacaggtcattgccaatcaacgcgaccagcgccagaccttcttccacctccacccgacacagtgcggaaagctccatcagcagagattgcgtcagcaacgtatcgccagtggaggttgaaccggtggtatcaagggttaatgccacgctcacttctgacgtggtgattaagtctaccgaaatattatgccgcgcgaggatgccgaaaacttccgcgaggaaaccgcgagaatgcagcatattcaggctgtgcaaagtgagcagagtctgattgcgacgaagcgccagagcgcggaacagcggcggattttcagttttattgcacaccagcgtaccacctgcgcgtgggtctttgctggagccgacaaagaccgggatatcgctgcgtactgcgggtagcaacgttgccggatgcagtacttttgcaccaaaagttgccatctctgccgcttcggcaaacgcgatttcatcaatgcgttttgctgcggaaactacgcgtggatcggtggtgtagatgcccgggacgtcggtccagatatcaacacgagatgcgtgtaaagcctccgccagcaaggctgccgtataatcgctgcctccacggccaagcgtcgttgtacgacctttattttcgctaccgataaatccctgggtgatcactaagccttcattgagacgtgggagcagctgcagcgcggccagttccgccagcgcggctatatctggctctgcacgaccaaatcggtcgttggtacgcatcactttacgtacatcaaaccactgtgcctgaacatcgcgttcgcgcaggatctcaacaaacagcagggtcgacatcagctcgccgtggctgaccagctcatctgtcagcgccggagacgttgccagcgccgccgcttctgccagaacagtaatgttctccagcagacgttcaatctcttcacggataacgttcgggtaacgcagacgttccagaatggcaaactggatgttgcggatagcgtcgagtttttcgaatcgctcgccaggttccagtccttcagctaaagcgaccagcagattagtgataccagcagaagccgagaggacaactaaacgcacgttggcatcagaaagcacaatatcagcgctgcggttcatggcgtcaaaatcagctacgctggtaccgccaaatttggagacaacaatttcagacataactacctcgtgtcaggggatccattttcagccttggcacaagggaagagcggaagacgggtgggcgcagagcgatacttcgctactattttcacccagaagtgctccaccacttgcgaaacgcccgactgcgaacgcttctggtgacaacccaggggattcagcccctgtagccgatgatgaacgtggccagccgttcaatcacctcggcgatgcaccccctcaggtgttatcacaggactggctcctccaacaccgttacttgggcaacgcgcctcttctggcctgcgctagcgcaggtagtacatttataaataaagggtgagcggggcggttgtcaacgatggggtcatgcggatttttcatccactcctggcggtcagtagttcagctaataaatgcttcactgcgctaagggtttacactcaacattacgctaacggcactaaaaccatcacatttttctgtgactggcgctacaatcttccaaagtcacaattctcaaaatcagaagagtattgctaatgaaaaacatcaatccaacgcagaccgctgcctggcaggcactacagaaacacttcgatgaaatgaaagacgttacgatcgccgatctttttgctaaagacggcgatcgtttttctaagttctccgcaaccttcgacgatcagatgctggtggattactccaaaaaccgcatcactgaagagacgctggcgaaattacaggatctggcgaaagagtgcgatctggcgggcgcgattaagtcgatgttctctggcgagaagatcaaccgcactgaaaaccgcgccgtgctgcacgtagcgctgcgtaaccgtagcaataccccgattttggttgatggcaaagacgtaatgccggaagtcaacgcggtgctggagaagatgaaaaccttctcagaagcgattatttccggtgagtggaaaggttataccggcaaagcaatcactgacgtagtgaacatcgggatcggcggttctgacctcggcccatacatggtgaccgaagctctgcgtccgtacaaaaaccacctgaacatgcactttgtttctaacgtcgatgggactcacatcgcggaagtgctgaaaaaagtaaacccggaaaccacgctgttcttggtagcatctaaaaccttcaccactcaggaaactatgaccaacgcccatagcgcgcgtgactggttcctgaaagcggcaggtgatgaaaaacacgttgcaaaacactttgcggcgctttccaccaatgccaaagccgttggcgagtttggtattgatactgccaacatgttcgagttctgggactgggttggcggccgttactctttgtggtcagcgattggcctgtcgattgttctctccatcggctttgataacttcgttgaactgctttccggcgcacacgcgatggacaagcatttctccaccacgcctgccgagaaaaacctgcctgtactgctggcgctgattggcatctggtacaacaatttctttggtgcggaaactgaagcgattctgccgtatgaccagtatatgcaccgtttcgcggcgtacttccagcagggcaatatggagtccaacggtaagtatgttgaccgtaacggtaacgttgtggattaccagactggcccgattatctggggtgaaccaggcactaacggtcagcacgcgttctaccagctgatccaccagggaaccaaaatggtaccgtgcgatttcatcgctccggctatcacccataacccgctctctgatcatcaccagaaactgctgtctaacttcttcgcccagaccgaagcgctggcgtttggtaaatcccgcgaagtggttgagcaggaatatcgtgatcagggtaaagatccggcaacgcttgactacgtggtgccgttcaaagtattcgaaggtaaccgcccgaccaactccatcctgctgcgtgaaatcactccgttcagcctgggtgcgttgattgcgctgtatgagcacaaaatctttactcagggcgtgatcctgaacatcttcaccttcgaccagtggggcgtggaactgggtaaacagctggcgaaccgtattctgccagagctgaaagatgataaagaaatcagcagccacgatagctcgaccaatggtctgattaaccgctataaagcgtggcgcggttaatcatcgtcgatatgtaggccggataaggcgttcacgccgcatccggcaaccgatgcctgatgcgacgcggtcgcgtcttatcaggcctacaggtcgatgccgatatgtacatcgtattcggcaattaatacatagcacgattgattaaataaccttaataacaatgccgacgttatgtcggcatttttttatcagataaatccccttgtctgtaatttaacggaaatcataccgtgaggttaatcctaaaatagatttttaatcgttgtttatttcggaaaatacgcagattaattgcttttgtttttattttaagtttatgatttttattgttatttaaatataagttgaaacttatatttgatattcattccaattatcctaaaacgccatcgctaattccccgcgccgtaattcgcatgctttagttgtgtatactcgatcccgcccgaaatgtttttgggtaaatctccattcattcaatgaagggaaattgttatgaaaaaagttctgtatggcatttttgccatatctgcgcttgcggcgacttctgcgtgggctgcacctgtacaggtgggcgaagcggcagggtcggcagcaacgtcggtttcggcggggagttcctccgcgaccagcgtcagcaccgtaagctcggcggtgggtgtcgcgcttgcggcaaccggtggcggtgatggttctaataccgggaccaccacaaccacgaccaccagtacccagtaataaagtatgtatccccaaaataattcgagtcattgcatctgtggctagaagtatgaagggattaaccataaccacactccggtgtggttattctgcccctctggagaagagtcgtgaagcgacctgcactcattcttatctgcctgttattacaggcctgttcagccacgactaaagagctgggcaattcactgtgggacagtctgttcggcacgccaggcgtacagctgacggatgatgatattcaaaatatgccctacgccagccagtacatgcagcttaatggcgggccgcagttatttgtggtgctggccttcgctgaagacggacaacaaaaatgggtcactcaggatcaggctactctcgttacccaacatggccgtctggtgaagactctgctcggcggcgacaacctgattgaagtgaataaccttgctgccgacccgctgattaaacccgcacaaatcgttgatggcgcaagctggacgcgcacgatgggctggaccgagtaccagcaggtacgctacgccaccgcacgctcagtcttcaaatgggatggcaccgataccgtcaaagtcggcagcgatgaaaccccggttcgcgtgctggacgaagaagtctccaccgaccaggcgcgctggcataaccgctattggatcgacagcgaagggcaaattcgccagtcggaacagtatctcggcgcggattattttccggtgaaaaccactctcatcaaggcggcaaaacaatgattaaacaaactattgtcgcgttgcttttgagtgtgggagcgtcatcggtcttcgcggcaggaaccgtcaaggtgttcagcaatggcagcagtgaggccaaaacgctaacgggcgcagagcatttaatcgatctggtaggccaaccgcggctggcaaacagctggtggcccggtgcggtgattagcgaagagctggcaacggcggcagcattgcgtcagcagcaggcgttgctgacacggctggcagaacagggcgcagattccagcgccgacgatgccgctgcgattaacgccttacgccagcaaattcaggcgttgaaagtgacgggcaggcaaaaaatcaatcttgatcccgatatcgtccgcgttgccgaacgcggtaacccgccgttgcagggcaactacacgctgtgggtcggaccaccgccgtccacggtcacgttgttcgggcttatcagccgtcctggcaagcagccattcactccaggtcgcgacgtggcgagctatctctctgaccagagcctgctcagcggtgcggatcgcagctacgcgtgggtggtttacccggacggacgcacgcaaaaagcgccggtggcttactggaacaagcgtcacgtagagccgatgcccggcagcattatttatgttggcctcgcggactccgtctggagtgagacgcctgatgcccttaacgccgacattcttcagactctgacgcagcggatacctcaataatgaaaaaaagacatctgcttagcttactggcgctgggcattagcacagcttgctacggcgaaacatatcctgcgcccattggtccgtcgcagtcggatttcggtggcgtaggattattacaaacgcccaccgcgcgtatggcacgggaaggggagttgagtctgaactatcgcgataacgatcagtaccgttattactcagcttcagtgcaactcttcccgtggctggaaacaacgctgcgctacaccgacgtgcgcacccggcagtacagcagcgtcgaagcgttctctggcgatcaaacgtataaagataaagccttcgatctcaaactgcgtttgtgggaagagagttactggctgccgcaagtggcggttggtgcgcgggatatcggcggtacggggctgtttgatgcggaatatcttgttgccagcaaagcctgggggccgttcgattttacgctcggcctgggctgggggtatttgggcaccagcggtaatgtgaaaaatccgctctgttcagccagtgataaatattgctatcgcgataacagctacaaacaggcgggatctatcgacggtagccagatgttccacggtcctgcctcactgtttggcggcgtggaataccagacgccctggcaaccgctgcgcctgaaactggagtatgaaggcaataattatcagcaggattttgccgggaagctggagcaaaaaagtaagtttaacgtcggtgcgatttatcgcgttaccgattgggccgacgttaaccttagctatgaacgtggcaacacctttatgtttggcgttacgttgcgcaccaactttaacgatctgcgcccgtcttacaacgataacgcccgcccgcaatatcaaccgcagccgcaggatgccattttgcagcattcggtggtggcgaatcagttaacgctgttgaaatacaatgccggacttgccgatccacagatccaggcgaaaggcgatacgctgtatgttaccggcgagcaggtgaaatatcgtgattcgcgcgaagggatcatccgtgcgaatcggatcgtgatgaacgatctgccggatgggatcaaaacgatccgcattacggaaaatcgccttaacatgccgcaggtgacgacggaaaccgatgtcgccagcctgaaaaatcatctcgccggagagccgttgggccacgaaacgacgctggcgcaaaaacgcgtcgagccagtggttccgcagtccaccgagcagggctggtatatcgacaaatcacgctttgatttccatatcgatccggtgctgaaccagtcggtcggtggcccggaaaacttttacatgtatcagctgggcgtgatgggaacggcagatttgtggctgacggaccatctgctgaccaccggcagcctgtttgcaaatcttgccaacaactacgacaagtttaactacactaatcctccgcaggactcgcacttaccgcgcgtgcgtacccatgtgcgcgagtatgtgcagaacgatgtctatgtgaataacctgcaagccaactacttccagcatctgggcaacggcttctacggtcaggtctacggtggttatctcgaaaccatgtttggcggtgcgggggcagaagtgttgtatcgcccgctggacagcaactgggcgtttggtctggatgccaactacgttaaacagcgcgactggcgtagtgcaaaagatatgatgaaattcaccgactacagcgtgaaaaccggacatctgaccgcctactggacgccatctttcgctcaggatgtgttagttaaagccagcgtcgggcagtatctggcaggggataaaggcggcacgctggagatcgccaaacgctttgatagcggcgtggtggtgggtggctatgccacgatcactaatgtttcgaaagaggagtacggcgaaggggacttcaccaaaggcgtgtatgtctcggtaccgttggatctcttctcgtctggcccgacacgcagccgtgcggcgattggctggacgccgctgacgcgtgacggtggtcagcaacttgggcgtaagttccagttgtatgacatgaccagcgaccgtagcgtcaatttccgctaagtcatgggaaaggtgccagttttcgcactcactggcaccttcattcttaatggcctgtcgagccatcaggaacgcagttcactcccggtttgcgatctggtgtgtaaaggcgaaaacattctgtcttcctgtccgtcgatatcggttgcaggtctggttgcctgagcgactgggccatcattgggctggagacattgctttgcggtaggtcggctttatcagcagtaccgagcggaccagcataagcaggaagaacagagactgataacatcaaagcagcaaaataaggcttcatttttaccacctttatcaggttacgtttcatttgttccagaggaacattgtcgatttttcgcgcattgctggtggctgggaatcacctgaatgggtgatttttgaattaccggctttggtgcggtttgtcttgccggatgcgccgccaggcgcggcttatccggcctacgggtaggtatatccggctttggtggaggcgcgctccaaatccaggttgaacaaaacatacacaaaaaatatagatctccgtcacatttttgcgttatacaggaagctcgccactgtgaaggaggtactgctatgacgtcactctctcgtccgcgcgtggagtttatctccaccattttgcagaccgtactcaatcttggcctgctgtgcctcggcctgattttggttgtcttcctcggcaaagaaacggtgcatctggctgatgtgctgttcgcgccagaacaaaccagcaaatatgagctggtagaaggactggtggtttactttctctatttcgaatttatcgcgctgattgtgaagtactttcagtccggttttcacttcccgctacgttactttgtctatattgggatcaccgccattgtgcgcttgatcatcgtcgatcataaatcgccactggatgtgttgatctactcggctgcgatcctgttactggtgatcaccctgtggctgtgtaattcgaaacggctgaagcgggagtaaaaagtcagcacgccgaaatggcgcggcgtgctggacaggaagattacagcgtagcagtttgttgtgttttcttcgtttccggttcccagagcgcttccagctcctcaagggttttacctttggtttccgggacaaatttccacataaacagtgctgccagaacgcccatacaaccgtaaatccagtaggagaaaccgttgtggaaatgggccaccagccaggagtttttgtccatcatcgggaaggtccaggagacgaagtagttcgccagccactgggccgccaccgcgattgccagcgctttaccacgaatagcattcgggaagatttccgacagcagtacccagcataccggaccccaggacatggcaaaggcggcaacatagaacagcatcgacagtagcgccacaatacccggtgcctgagtgtaaaacgcggtaccgaggctaaacataccgattgccattccgagtgcgccgataatttgcagtggcttacgaccaaatttatccaccgtcataattgccagaacggtgaaggtgaggttgataactccgacaataatggtctgcaacagcgcgatatccgtgctggcccccagcgttttgaacacttccggcgcgtagtacagcaccacattgatgccgacaaattgctggaagatggagagcattacgccgattacaatcacgcccacgccaaacatcagcagacgaccaccggttttgcggccatgatccagggagtgtttaatttcctgtactgcctgagttgcaagcgtgttgcccataattttgcgcaggataccttccgcctgttcttgcttgccgcgcgacatcagccagcgaggactttctggcacggtatacagcagcattaagaacagcagtgcagggatacattccgaggcaaacatataacgccagccgtcagtattcagccagctggcatcaccggaacgggcaataaaatagtttacgcagtaaactaaaagttgcccgaaaataatcgcaaactggttaaaagagaccagtttcccgcgaatatgagctggagccagttccgcaatatacattggcgagagcattgaggctaaaccaacgccaataccgccaataatgcgataaataacaaattccgggacataacctgccagataaacaggcacagtgttgtccgggtttatagaggtaaaaccaagttctggccaggcagaacctacaccagaaataaaaaacaggacagcagcaatcttaagtgaatcacgacgaccgaagcggttactgcaataaccaccgagggcaccgccgatgatgcaaccaatcagagcgctggccacgcaaaaccctaacagggagttggcagcggattcacttaagttttgtggagcaacaaagacggtattgagtgactcaacagtaccggaaataacggcggtgtcgtagccaaataataaaccacctaatgtagcgactaaggtaatcgaaaatatataactggaattatactgggtattcattcagacctgccttagaccattctgatcttttatcagtgcattgatgttggaattgtcaggcagttaaggcaattatcattttttacaatgcgtttacgtaatgtcttttctgtgatcttaattgtgataattatccaaaattgataaaaacaatactattgccgtgactcagagcacgaaagagaattatcgtaagtgggaaaacaaataacgtaaaaataataagctctatgatggaaatattaaccggcgaacgattcagattgcagacgaaagaaaaaaaggcgctccgtggagcgccgaataacagtcacaagttgggataacgtaagttgagggtgcagcggcataacattggcagaacaacatctttaacctttcacaccacctgccgtcaggccgttgaccagccagcgttgagccagcaagaagacgatggtgatcggtaatgcagacatcacggcagcggcggcaaagtcaccccacaggtagttttgcgggttgaggtattgctgcatccccacggccagggtgtagctgtttacgtcacgcagtaacagcgacgcgaccggaacttcagtaatggcagcgataaacgacaggatgaataccaccgccagaatcggtactgacagcggcaacaggacaaggcggaaggcctgccacggtgtcgcaccatccagcgcagcagcttcttccagcgaactgtcgatggtttcgaaatagcctttgatggtccagacatgcagcgcaatcccacccagatacgcgaaaattacgccgccgtgagtattcaggccaatgaatggaatgtactcacccagacgatcaaacaacgcatacaacgcgaccagtgaaagtactgccgggaacatctggaaaatcagcattcctttcagcagcgtcgctttgcctggaaagcgcatacgggcgaaagcgtaggcgcaggtggtggagagcgccacaatgccaatcgcggaaatcccggcgacctttaccgagttccacagccacagcagtaccgggaatggcggtggcgtaatgcgaccatcagcctgttcaacgctaaaacctaacgccagtttccagtgatcccaggagatttgctccgggatcaggctgccggtcgcaaagtttccctgacgcagcgagatagcgacgaccatcagcagcgggaacataatcgctgcgataaaaagtagcagtagcaggtgagtaataaataaacgagctttttgcgatttcggttggaccattgccatttttgttatctcccttaatcaaacttcattcgcgtggctttcaggttcactatcgccagcgcacccaccagcaggaagatcagcgtggcaattgctgccgccagaccgaagtcctgacccccgccgccttcaaaagcgatgcggtaggtgtagttaacaagcaggtcggtataaccggctggcgtggtcgtgccaagacgatccgggccgccgttggttaacagttgaatcagcacgaagttgttaaagttaaaggcgaagctggcgatcatcagcggcgtcagcggtttaatcagcagcggcagcgtaatcttaaagaagttctggaacggacctgcgccatccattgctgaggcttcatacaaatcgtccggaatcgctttcagcaagcccatgcagaggatcatcatgtacggataacccagccaggtattgacgataattagcatcgtgcgggcggtggtcggatcgctgaaccaggcgggcttcacgccaaacagcgcgctcaacatcatgttgatttcaccgaagctctggttaaacaaccctttgaaaatcaagattgaaatgaacgatggcaccgcgtagggcagaatcagcaggacgcgatagaccgctttgccgcgcaacgcttcccactgcaccagacacgccagaaccatgccgaccgccaccgttaaaaagacagtgatcagcgagaacaccacggtccagacgaaaatggcgaggaacggtttctgaatgccttcgtcggtaaagacgcgggtaaagtttttccagccggtggtcacggtgtaaccggggcttagcttttcatcaccccagttgccgtcggcggtaatggactggtaaaagccaatttggttattcggacgatatttcacgccgctctgattattcgtcaacgtgccgtcaccgtcgagtgtgtagagcggctgcgtgccagaaaactggcgcagggagctcatcatcactttgttgccatccggcagaatggcggtaatgtcactcagcgcctgacgattctgggtaatcacgcgcagattcgcgcgttcgccttcgggctgggcggtcgtttctttcagttgcagtttttgctcgccgccaaatttaaaagcgtcggagaggtaatttttgccggtttcgccgtcgctgagcgccagttgccactcatcgcccgccgggtaaagaccaaagttataggttttgcctgcttgccaggagcgatctaacaacacttcctgcgcacgttcaaaagtcagctggttagtgctgctgtagttggtgaaggcaatggcgatggtgcagaccagagggaagaggacgaataatcccattccagccattcccgggtaaacatagcgccaggcgtaggctttacgattggcgaaaatatacagccccgctgaactcaatatcagcgtggtaatggcgaacaggtattccccttgtgcgtacattaaaacaacaaggtaacccaccagcaggccgagcagacctagcactgaccatttcagcgcgtcgctttgccaccaatgtttctttttaatgacatccatggggttcttcctcattccaggacggataaggctttcacgccttatccgacaacaactgcctgatgcgacgctgacgcgtcttatcaggcctacatacgtttcggttttgtaggccggacaaggcgttcacgccgcatccggcatttcacagcattacttggtgatacgagtctgcgcgtctttcagggcttcatcgacagtctgacgaccgctggcggcgttgatcaccgcagtacgcacggcataccagaaagcggacatctgcgggatgttcggcatgatttcacctttctgggcgttttccatggtggcggcaatacgtggatctttcgccaactcttcctcgtaagacttcagcgctacggcacccagcggtttgtctttattaaccgcttccagaccttcatcagtcagcagatagttttcgaggaactctttcgccagctctttgttcggactggcggcgttaatacctgcgctcagcacgccaacgaacggtttggatggttgacccttgaaggtcggcagtaccgttacaccataattcactttgctggtgtcgatgttggaccatgcccacgggccgttgatggtcatcgctgtttcgcctttattaaaggcagcttctgcgatggagtaatcggtgtctgcattcatgtgtttgtttttaatcaggtcaaccaggaaggtcagacccgctttcgcgccagcgttatccacgcccacgtctttaatgtcgtacttgccgttttcatacttgaacgcataacccccgtcagcagcaatcagcggccaggtgaagtacggttcttgcaggttgaacatcagcgcgctcttacctttcgctttcagttctttatccagcgccgggatctcttcccaggtttttggcgggttcggcagcagatctttgttataaatcagcgataacgcttcaacagcgatcgggtaagcaatcagcttgccgttgtaacgtacggcatcccaggtaaacggatacagcttgtcctggaacgctttgtccggggtgatttcagccaacaggccagattgagcgtagccaccaaagcggtcgtgtgcccagaagataatgtcagggccatcgccagttgccgcaacctgtgggaatttctcttccagtttatccggatgctcaacggtgactttaattccggtatctttctcgaatttcttaccgacttcagcgagaccgttatagcctttatcgccgttaatccagattaccagtttaccttcttcgattttggcgagagccgaggcggaaaacatcatcgtcgttaatgcggataatgcgaggatgcgtgcacctgtttttattttcataatctatggtccttgttggtgaagtgctcgtgaaaacacctaaacggactctagtttctttatacggcaacctctttccatcctccttgcccctacgccccaccgtcgctttgtgtgatctctgttacagaattggcggtaatgtggagatgcgcacataaaatcgccacgatttttgcaagcaacatcacgaaattccttacatgacctcggtttagttcacagaagccgtgttctcatcctcccgcctcctcccccataaaaaagccagggggtggaggatttaagccatctcctgatgacgcatagtcagcccatcatgaatgttgctgtcgatgacaggttgttacaaagggagaagggcatggcgagcgtacagctgcaaaatgtaacgaaagcctggggcgaggtcgtggtatcgaaagatatcaatctcgatatccatgaaggtgaattcgtggtgtttgtcggaccgtctggctgcggtaaatcgactttactgcgcatgattgccgggcttgagacgatcaccagcggcgacctgttcatcggtgagaaacggatgaatgacactccgccagcagaacgcggcgttggtatggtgtttcagtcttacgcgctctatccccacctgtcagtagcagaaaacatgtcatttggcctgaaactggctggcgcaaaaaaagaggtgattaaccaacgcgttaaccaggtggcggaagtgctacaactggcgcatttgctggatcgcaaaccgaaagcgctctccggtggtcagcgtcagcgtgtggcgattggccgtacgctggtggccgagccaagcgtatttttgctcgatgaaccgctctccaacctcgatgctgcactgcgtgtgcaaatgcgtatcgaaatctcccgtctgcataaacgcctgggccgcacaatgatttacgtcacccacgatcaggtcgaagcgatgacgctggccgacaaaatcgtggtgctggacgccggtcgcgtggcgcaggttgggaaaccgctggagctgtaccactatccggcagaccgttttgtcgccggatttatcggttcgccaaagatgaacttcctgccggtaaaagtgaccgccaccgcaatcgatcaagtgcaggtggagctgccgatgccaaatcgtcagcaagtctggctgccagttgaaagccgtgatgtccaggttggagccaatatgtcgctgggtattcgcccggaacatctactgccgagtgatatcgctgacgtcatccttgagggtgaagttcaggtcgtcgagcaactcggcaacgaaactcaaatccatatccagatcccttccattcgtcaaaacctggtgtaccgccagaacgacgtggtgttggtagaagaaggtgccacattcgctatcggcctgccgccagagcgttgccatctgttccgtgaggatggcactgcatgtcgtcgactgcataaggagccgggcgtttaagcaccccacaaaacacacaaagcctgtcacaggtgatgtgaaaaaagaaaagcaatgactcaggagatagaatgatgattactctgcgcaaacttcctctggcggttgccgtcgcagcgggcgtaatgtctgctcaggcaatggctgttgatttccacggctatgcacgttccggtattggttggacaggtagcggcggtgaacaacagtgtttccagactaccggtgctcaaagtaaataccgtcttggcaacgaatgtgaaacttatgctgaattaaaattgggtcaggaagtgtggaaagagggcgataagagcttctatttcgacactaacgtggcctattccgtcgcacaacagaatgactgggaagctaccgatccggccttccgtgaagcaaacgtgcagggtaaaaacctgatcgaatggctgccaggctccaccatctgggcaggtaagcgcttctaccaacgtcatgacgttcatatgatcgacttctactactgggatatttctggtcctggtgccggtctggaaaacatcgatgttggcttcggtaaactctctctggcagcaacccgctcctctgaagctggtggttcttcctctttcgccagcaacaatatttatgactataccaacgaaaccgcgaacgacgttttcgatgtgcgtttagcgcagatggaaatcaacccgggcggcacattagaactgggtgtcgactacggtcgtgccaacttgcgtgataactatcgtctggttgatggcgcatcgaaagacggctggttattcactgctgaacatactcagagtgtcctgaagggctttaacaagtttgttgttcagtacgctactgactcgatgacctcgcagggtaaagggctgtcgcagggttctggcgttgcatttgataacgaaaaatttgcctacaatatcaacaacaacggtcacatgctgcgtatcctcgaccacggtgcgatctccatgggcgacaactgggacatgatgtacgtgggtatgtaccaggatatcaactgggataacgacaacggcaccaagtggtggaccgtcggtattcgcccgatgtacaagtggacgccaatcatgagcaccgtgatggaaatcggctacgacaacgtcgaatcccagcgcaccggcgacaagaacaatcagtacaaaattaccctcgcacaacaatggcaggctggcgacagcatctggtcacgcccggctattcgtgtcttcgcaacctacgccaagtgggatgagaaatggggttacgactacaccggtaacgctgataacaacgcgaacttcggcaaagccgttcctgctgatttcaacggcggcagcttcggtcgtggcgacagcgacgagtggaccttcggtgcccagatggaaatctggtggtaatagcaaaacctgggccggataaggcgtttacgccgcattcggcaaccaacgcctgatgcgacgcttgcgcgtcttatcaggcctacaacggctgtcaaatgtaggccggataaggcgtttacgccgcatccggcataaaaacaggttgtcattatctgaaaggggcgaaagcccctctgattatcgggtttagcgcgctattgcctggctaccgctgagctccagattttgaggtgaaaacaatgaaaatgaataaaagtctcatcgtcctctgtttatcagcagggttactggcaagcgcgcctggaattagccttgccgatgttaactacgtaccgcaaaacaccagcgacgcgccagccattccatctgctgcgctgcaacaactcacctggacaccggtcgatcaatctaaaacccagaccacccaactggcgaccggcggccaacaactgaacgttcccggcatcagtggtccggttgctgcgtacagcgtcccggcaaacattggcgaactgaccctgacgctgaccagcgaagtgaacaaacaaaccagcgtttttgcgccgaacgtgctgattcttgatcagaacatgaccccatcagccttcttccccagcagttatttcacctaccaggaaccaggcgtgatgagtgcagatcggctggaaggcgttatgcgcctgacaccggcgttggggcagcaaaaactttatgttctggtctttaccacggaaaaagatctccagcagacgacccaactgctcgacccggctaaagcctatgccaagggcgtcggtaactcgatcccggatatccccgatccggttgctcgtcataccaccgatggcttactgaaactgaaagtgaaaacgaactccagctccagcgtgttggtaggacctttatttggttcttccgctccagctccggttacggtaggtaacacggcggcaccagctgtggctgcacccgctccggcaccggtgaagaaaagcgagccgatgctcaacgacacggaaagttattttaataccgcgatcaaaaacgctgtcgcgaaaggtgatgttgataaggcgttaaaactgcttgatgaagctgaacgcctgggatcgacatctgcccgttccacctttatcagcagtgtaaaaggcaaggggtaattacgccccacagtgctgattttgcaacaactggtgcgtctcctggcgcacctttttttatgcttccttcctgggatatgagcgattttttatagtaactcacttcttcttcactaagaatatccattatctcaatgccttatcagagattcttttcctttcgccggtagtgtctggacattcaggctacttttccaggttattttatttctgttatgcagaggttttatgataagtcatatcctaaattctggcggcaataactctttgatgaaacatgatgtggtgcaaggaaataatatagtagatcttgatttactacgtaatttaaatggggtgccaggtttaaacagagataactttatttatatcagcaatattttttcaaatataaaacaacggaacgaaaaaatcatgcaataaatatgtttcgtgaagtctcaatcagtaatgatactataagtgtaaaattctacagaaatgaaaaaaattgaatgcgcttgcaattttctgatggataaagatgcgcaggggtatatcgacctgtctgatttggatttaacaagttgtcattttaaaggtgacgttatatcgaaggtgtcttttttatcatcaaatctacaacatgtaacattcgaatgtaaagaaattggggattgcaattttactactgcaatagttgataatgtcatatttagatgtcgacgtttacacaatgtgatttttatcaaagcgagtggtgaatgtgtcgatttcagcaaaaatattcttgatacagttgacttctcgcagagtcaacttggtcatagtaattttcgcgaatgtcagattagaaattcaaacttcgataattgttatctttacgcttcgcacttcaccagagcagagtttctgtctgccaaagaaatatcatttattaaatcgaatttgacagctgttatgtttgattatgtgcgaatgtcgacagggaattttaaagattgcattacagaacaattggaattaactattgattattcagatatattttggaatgaagatctcgatggttatatcaataacattataaaaatgattgatacattgccagataatgcaatgatattgaaatccgttctggccgtaaaactggtgatgcaattaaaaatacttaatattgttaataaaaactttattgagaatatgaagaaaatatttagccattgtccttatataaaagatcccattatacgcagttatatccattctgatgaagataacaagttcgatgattttatgcgtcaacatcgattcagtgaggtgaatttcgatacccaacagatgatcgattttattaacagatttaatacgaataaatggctaattgataaaaataacaatttttttatccaacttatcgatcaggccttacgatcaacggatgatatgatcaaagcaaatgtttggcatctttataaagagtggattcgtagtgatgatgtttcacctatatttatagaaactgaagataatttaagaacctttaacacgaatgaattaacacgaaacgataatatctttatcctgttctcctcagtcgatgatgggccagttatggtggtaagctcccagcgcttacatgatatgttgaatcctacaaaagataccaattggaattccacgtatatctacaaatccagacatgagatgttgcctgttaatcttactcaggaaacacttttcagctccaaatctcatggtaaatatgcgcttttccccatttttactgcgagttggcgagctcatcgtataatgaataagggtgtttaagtaaaggaaaacatcaccgttcctggcatcctggacggtgatgcccctacggttgccctcgccagcacgggcatcggtaaagcgtaaggttcaacatcgttttaccacttcatgcgattgttgcgtttttgttgcgtattagatcacttaatttgctttacatctcccgtaaacacttttctgcgatacaatgcctttacgttatgtaacggagagttcggcatgtcacaccccgcgttaacgcaactgcgtgcgctgcgctattgtaaagagatccctgccctggatccgcaactgctcgactggctgttgctggaggattccatgacaaaacgttttgaacagcagggaaaaacggtaagcgtgacgatgatccgcgaagggtttgtcgagcagaatgaaatccccgaagaactgccgctgctgccgaaagagtctcgttactggttacgtgaaattttgttatgtgccgatggtgaaccgtggcttgccggtcgtaccgtcgttcctgtgtcaacgttaagcgggccggagctggcgttacaaaaattgggtaaaacgccgttaggacgctatctgttcacatcatcgacattaacccgggactttattgagataggccgtgatgccgggctgtgggggcgacgttcccgcctgcgattaagcggtaaaccgctgttgctaacagaactgtttttaccggcgtcaccgttgtactaagaggaaaaaaatatggagtggagtctgacgcagaataagctgctggcgtttcatcgcttaatgcgtacggataagccaattggcgcgttactgctgctctggccaacattatgggcgttgtgggtggcgacaccgggcgttccccagctctggatcctggcggtgtttgtcgcgggtgtctggctgatgcgcgctgccggatgtgtggtgaatgattatgctgaccgcaagtttgatggtcatgttaagcgcacggcgaaccgaccacttcccagcggcgcggtaacagagaaagaggcgcgcgcgctgtttgtcgtgctggtactgatttcgtttttactggtgctgacgctgaatacgatgaccattctgttgtcgattgccgcgctagcgctggcgtgggtgtacccgtttatgaagcggtatacccatctaccgcaagtggtgctgggcgcggcgtttggctggtcgattccaatggcttttgccgctgtgagtgagtcggtgccattgagttgctggttaatgttcctcgccaatattctctgggcggtggcttacgacacgcagtatgcgatggttgaccgcgatgatgatgtgaagattggcattaaatccacggcaatcctgttcggccaatacgataaattgattattggtattttgcagattggcgtactggcactgatggcgatcatcggtgagttaaatggcttaggctggggatattactggtcaattctggtggctggcgcgctgtttgtttatcaacaaaaactgattgccaaccgcgagcgtgaagcctgctttaaagcatttatgaataataactatgttggtctggtactatttttagggctggcaatgagttactggcatttctgatgatgtaaaaaagccggatgatcatccggctttcttctgggttgcctgatgcgcggcgcttctcaggcctacacaacacatcgcaatttattgaatttgcagattatggaaggccggataaggcgttttcgccgcatccggcaattctctctgattacccttcgccctgcgtcgcactctcaatcgtcaaacgcacgtctgatgtaatcaactccgccagcaactgataaaccttcatcgtttctgccggttcggcatcgccgctatcgctgatatacccttcatcacgcagtgtcagcaccagagaactgaacaccgccttgtcgaagaactccggcgcgttgatgccgtgcagcacggagagacgttgcgcgacggtgcggctctctttctccagcgtaccgcggttgatcgacgggttggcactcaacaaccagaaggtgatggcataacgttgcagcgtttcgcgcgcgcctgcggccagcagctgtagcgtgcgagaatgcgccgggttgatatgcaactcatcatcttgcagggtaatcagcccctgacgttgcatctcatttgccagcgcatcaataacgtccggcaactcgtcgcgatcccagcgcaggaacagctccgctttcagcattgggtaaagcacattgacgtgctccatcaatacgtcgcgggagatgtggcgatgctgggtgacgattgccgccatcagcgaaggcagcaccaacatatgcgcaatgttgttgcgatagtaggtcatcagcaccgcttgctcgcgcggcagaatgatgatgtcgccgattgtgtctttctcgacttcaaacttgttcatttgcagcgcgtgatcgataagctcgctggcgctggctgaaggaacggtagagtccgtggagtagggcacgttgcgcatcagatccaggtagcagttgagttgctcggttaactgctcgcgggtgagtgagcgctgacgtgatgccagtagcgcagtacagcacaggttcatggcgtttgccgcgcctgcgttgttaatgcgtaccatcagatcggcagcaatattattgaccgtcggcgttaaccatgccggacgcaccgcttcgatgggatcgatagattcacgccagtcaggtacatgctggttaaggtaggtcatcaacggcattggttcaccgaagttgacgtaaccctgaccgagattacgcagcttgcttaaaccgcgcagcatctgcggcaggctctctttctctttcgtcgcgccgcgcagttctttggcgtaagtacccacttccatgacgtgctcataaccgatatagatcggaatcagcgtaatcggacgcgtgccgccacgcagcatcgcctgaatggtcatcgacagcgtaccagttttcggatccagcaaacgccccgtacgggaacgaccgccttccacgaagtactcgacggaataaccacggctgaacagttcgccgagatactcccggaaaacggtggaataaagtttattgcctttaaacgtacggcgaataaagaacgcccccagacggcggaaaatcggcccggcaggccagaaattcaggttgatcccggcggcgatatgcggcggcaccagcccctggtgatacagcacgtaagaaagcagcaggtagtccatgtgactgcggtggcaaggcacatataccagctcatgaccgtcgtgggccagctggcgaacgcgctcagcgttatggacgttgatgccctggtaaagtcggttccaggtgaagcccagaatacggtcagtcaggcgaatcatctcgtaagagaaattcgccgcaatctcttccatcagtgcaatcgcgttctgctgcgctttttcatgggagatttttttgctgcgcgcttcatcttctaccgctttggcaatggcgcgggaggcgagcagcttattaaacagatcctgacgagcaggcaaacgtgggcctacggcagccagacgttgacgggcaaagtgcatacgcgccacgcgcgccagtttctgagcgatagttttatccgtgccgtgttcatccgccatacggcgcagcgaaactgacggcgagaaacgcacaaaactgtcgcgaccgagccacagtacagcgaaaaatttctgtacgccgttaagcatacgcagcggcgggttcacttcgcctttttcacgccccggcgcgcgaccaaacatcaccgacactggcaccatctgcacatccagatttgggttgctacggtgcaaatcgagatagtcgtggaacagcttaatagactcttctttcggcgtgtaataggtgaacacacgcggcccgccgtgaatgaacacatagcgcggcagtagcgtgccgtcgatttccagcggctctaacgggtcaggcaagtcatgtgccagacactgggcgcgcaacgtcagcaaatctgctttcgagttgtacggtaaaacgtacataattggacgagaggtatccagccccagttccggggcaggatctgccggaatagacttgctttttaccaggatgcttaatggtaaattcagtaatttgtagtaaattcgtggccagccggacataaacgatgtaaagcctctggttaataatgcaaatgcgcggcaaggatagcagaaagtcatgggaaattctgtggtatccgctcatgtttcgcgcggcgctacgcaaacccgaatcatcggatttaacggtacactgatattgacgctcataatgtaaaaaggttctttcaatggccaataataccactggattcacccgaattatcaaagctgctggctattcctggaaaggtttacgcgctgcatggatcaacgaagcggcattccgtcaggaaggcgtagcggtattgttggcggtggtcatcgcctgctggctggatgtggacgcgattacccgcgtgctgcttatcagctccgtgatgctggtgatgattgtggaaatcctcaatagcgccatcgaagcagtggttgaccgaattggctctgaataccatgagctttccggacgcgcaaaagatatgggatccgctgcggtgctgattgccattatcgtcgccgtgattacctggtgcattctgttatggtcgcattttggataacccttccagaattcgataaatctctggtttattgtgcagtttatggttccaaaatcgccttttgctgtatatactcacagcataactgtatatacacccagggggcggaatgaaagcgttaacggccaggcaacaagaggtgtttgatctcatccgtgatcacatcagccagacaggtatgccgccgacgcgtgcggaaatcgcgcagcgtttggggttccgttccccaaacgcggctgaagaacatctgaaggcgctggcacgcaaaggcgttattgaaattgtttccggcgcatcacgcgggattcgtctgttgcaggaagaggaagaagggttgccgctggtaggtcgtgtggctgccggtgaaccacttctggcgcaacagcatattgaaggtcattatcaggtcgatccttccttattcaagccgaatgctgatttcctgctgcgcgtcagcgggatgtcgatgaaagatatcggcattatggatggtgacttgctggcagtgcataaaactcaggatgtacgtaacggtcaggtcgttgtcgcacgtattgatgacgaagttaccgttaagcgcctgaaaaaacagggcaataaagtcgaactgttgccagaaaatagcgagtttaaaccaattgtcgttgaccttcgtcagcagagcttcaccattgaagggctggcggttggggttattcgcaacggcgactggctgtaacatatctctgagaccgcgatgccgcctggcgtcgcggtttgtttttcatctctcttcatcaggcttgtctgcatggcattcctcacttcatctgataaagcactctggcatctcgccttacccatgattttctccaatatcaccgttccgttgctgggactggtcgatacggcggtaattggtcatcttgatagcccggtttatttgggcggcgtggcggttggtgcaacggcgaccagctttctctttatgctgttgctgtttttacgcatgagcaccaccgggctgactgcgcaggcttatggtgccaaaaatcctcaggcattagcccgtacgctggtgcaaccgttgctgttggcgttgggggctggggcgttaattgcgctgctgcgtacgccgattatcgatctggcgctgcatattgttggcggtagtgaggcagtcctggaacaggcgcggcgctttcttgaaatccgctggttaagcgcaccggcgtcgctggcgaatctggtattactcggttggttactcggcgtgcaatatgcccgtgcgccagtaattttgttagtggtcggcaatatcctcaacattgtgctggatgtctggctggtgatggggctgcatatgaacgtgcagggcgcggcgctggcgacggttattgcggaatatgcaacattgctgattggtctgctaatggtgcgtaaaatcctcaaactacgcggaatttccggcgaaatgctgaaaactgcctggcgaggaaacttccgtcgcttgctggcgcttaaccgcgatatcatgctgcgttcgctgttgttgcaactctgtttcggcgcgatcaccgtacttggcgcgcgactggggagtgacattatcgctgttaacgcggttctgatgacgctactcacctttaccgcctatgcgctggatggttttgcctacgcggttgaagcgcactccggtcaggcatacggtgcgcgcgacggtagccagttgctggatgtctggcgggcagcgtgccgccagtcggggatcgtagcgttactgttttcggtggtttatttgctggctggggaacacatcattgcgttactgacgtcgttaacccagattcagcagctggctgaccgctatcttatctggcaggtgattttgccggtggttggcgtctggtgttatctgctggacggcatgtttataggcgcaacgcgtgccaccgaaatgcgtaacagtatggcggtggccgccgcaggttttgcgctgacgctccttacgctgccgtggctgggtaatcatgctttgtggctggcattaaccgtctttctggcgttgcgcgggctttctctggcggctatctggcggcgtcactggcgcaatggtacctggtttgccgcaacgtgacggttaaaaattctgaataaataatcctaagccaaattgctgactacacttaatctcacgttcagaagaaaagtgaacgtactctcattcacaacctaacgatgaggtcttgattatgaataaagatgaagccggcggtaactggaaacagtttaaaggtaaagtgaaagagcaatggggcaaactgaccgatgatgatatgacgatcattgaaggtaaacgtgatcaactggtcggtaaaatccaggaacgttatggttatcagaaagatcaggcagaaaaagaggtcgtggattgggaaacccgcaatgaatatcgctggtaattaatccctcctgcccgacgtgtacaaggatgtacgccctcttaacgcggtttctttttcacctgcacagagtgatcatgctggcactgttcaggatgacgacacgcttccacttctacacatgccgcacagagcccatgtgcttcaatcacattatgccgcagggcaaaccccatttttgccgccagcgtatgcataatgtcttccacgccttctgcacactcttctttcactgcgccgcagcgatcgcaaataaacatggctgacgtatgggtgggctgatcgaacagatgacagagcacataactgttggtggattccaccttatgcacaaaaccttgctcaagcagaaaatccagcgcgcgataaaccgttggcggcttggcttgcggttcagcttcgcgcagtaaatcaagcagatcataagcgctgatagcgccatcctgcagactcatcaggcgcaacacttccaggcgctgtggggtcaggcgcacattacgctgcgcgcagattttttcagcctgcgctaataactcctgcgttgtggtcttttccatcgggcacctcaaagtgggggttaagaatgtccttactttaccatgttccaggaaaaacaccgagaacccttattgttgccgtaatgttgattttctgttttgtaggtaaggtgttatgttgccttgtcgtaccattatcaacacgataataattaataattcatttttaaataaattgcttcaagttaactcgctatttatttaactgggtttaaacgcatacctgtagttcagaaattatgagcgatttttgatagtgaccagatggcaaaagaattataaggaggacacggtacgacaaaaaaggtagatgaatcatgttgaagataatacccggtgcaactggatactttaataaaacactcaattcaaatcaattcgataatgaagatgcaatcaaagataaattagataatagaggttcaatcaaaggtaaattaaataatatatatggtaaatctattgattatgcagcgctgcgtcatcgggatataattattgcaaaaatagatttgtttattcaacgaatcacgcataatttatggcatgcacgtaaaaaaatgtgtttttaattgtgcaaataaatgatctcaaaatgtgggtcaataagtatattgacgattgcactgatgaggatttaaacgatcgtgactttattgcatcagttgttgaccgggctatttttcatttcgcgattaatagtatatgtaatcctggggataataaagatgcaatgcccattgaacaatgtacttttgatgtagaaactaagaatgaccttccctccacggttcagctattttatgaggaatctaaggataatgaacctttagcgaatatacattttcaagcaataggttctggttttttaacgtttgttaatgcctgccaggaacatgatgacaacagcttaaaattatttgcttcgctgttaatttcactttcatattctagtgcctacgcagatttatcagaaacagtgtatattaatgaaaataatgagagctacctgaaagctcagtttgaaaaattatctcaacgtgatatgaagaagtacctgggagagatgaagcgtctggctgatgggggagaaatgaattttgatggctatctggataagatgtcacatctggtgaatgaaggaacgctcgatcctgatattttaagcaaaatgcgagatgctgcaccacaattaattagcttcgcgaagtcgtttgacccaacctcaaaggaagagattaaaatacttacagacacttctaaattaatttatgatttgttcggggttaaatcggagaaataatatgtgaagttcttcgatagtatggaaggcattatataaaaggacccaatatttattgggttcttttttctctatcaatactattagcagggagatatatcaccagagtttaatgtgtgattttttatttatcgtcgaacctggattgtttatcattggccttaacaaagttaacggctaataagattatttccatcacttcgtgagagcttcatgccttgagaggatctcaattttcttttgcaatgagacaggcgcttcctgttgttatggtatagtaccccgctattgagcctcctgaatagtgatgctgaataacataaccccatgatatatcgataaaataatctctacatttgaaaatgcacggtaattctgaaatgcaaaaaatcaaccaaaccagcgcaatgcctgaaaaaactgacgttcactggagtggtcggtttagcgttgcaccaatgctcgactggacggacagacattgccgctatttcttgcgtctgctttcccgcaatacgttgctgtataccgaaatggtgaccacaggggcgattattcacggtaaaggtgattatctggcgtacagtgaagaagaacatccggtagcgttgcaactgggcggtagcgatccggcggcgctggcgcagtgtgcaaagctggcagaagcgcgcggatatgatgagatcaacctgaatgtcggctgcccgtctgaccgggtgcagaacggcatgtttggtgcgtgtctgatgggtaatgcgcagctggttgccgactgcgtgaaagcgatgcgcgatgtggtgtcgattccggtgacggtgaaaacgcgtattggcatcgacgaccaggacagctatgaatttctctgcgatttcatcaataccgtttccggcaaaggcgagtgtgagatgttcatcatccacgcacgtaaagcctggctttcggggttaagcccgaaagaaaaccgtgaaatcccgccgctcgattatccgcgtgtgtatcaactgaagcgtgactttccgcatctgacaatgtcgattaacggtggtatcaagtcgctggaagaggccaaagcacacctgcaacatatggatggcgtgatggtcgggcgcgaggcgtatcagaatccgggtattctggcggcggtagaccgggagatctttggttcctcggataccgatgccgatccggtggcggtagtgcgcgccatgtatccgtacattgagcgtgaactcagccaggggacgtatctcggccatattacccggcatatgttgggcttgttccagggtattcctggcgcgcggcagtggcggcgttatttaagtgaaaatgcccataaagcgggtgcagacattaatgtgctggaacacgcgctcaaactggtggcggataagcgttaacttttcaccaaaaagtagtcaaattcaccacgccctgcgcaccgtcgcggggcgttttgctgttaaatcaatagattatttttggcatgattcttgtaatgccagcaagagatttcatatttgggagagcatcatgctggaactactttttgtgattggcttttttgtcatgctgatggtcaccggcgtttcgttgctgggcattatcgccgcgctggttgtggcgacggccattatgttcctcggcggtatgctggcattgatgattaagttgctgccgtggttactactggcgattgcggtggtgtgggttattaaggcgattaaagcaccaaaagtgccgaaatatcagcgttatgaccgctggcgttactaagggattgtgcggatgatcacaacctaaggttttatccttagaacaaaataggaattgataatcaaatctgtcactattgcgcctctaacagattcatcgtgctgtaccctacatacagccgaactataaaaagaaagggcttcccaggtggaagccctatttcttttatggaatcagcaggctggaaccttgcgtcgcccggctttccagaatctcatgcgcacgctgcgcatccttcagcggatatttctgctgctcggcgacatcgaccttaatcacaccgctggcaatcaaagagaacagttcattactggcctcggttaattcctcccgcgtggtgatatagccttgcagggaagggcgtgtcacatacaacgagcctttttgattgagaatgcctaagttcacaccggtaaccgcacctgatgagttgccaaaactgaccattaagccgcggcgttgcaggcaatccagcgaccgttcccaggtgtctctgcccacggaatcgtacaccacgcgcactttcttaccgccggtgatctcttttaaccgctcgaccagatcctcttcacgatagttaataacctgccacgcgcccgcttttagcgcgctctgcgctttttgcgcggttcctacggtgccgataagtttcgcgcccagggcttttgcccactggcaggcaattaagccaacgccgccagccgctgcgtggaacaggaactgttcatcgggtttaatttcataggttttgcgcagcagataataaaccgttaagcctttcaggaaggatgccgcagcttgctcaaaagaaattgccgcaggcagaatcgccgctttatccgcaataatgttatgcacagagctgtaagcgcctaacgccgactgcgcatagactacacgatcgcctgccttaatatgctttacaccactgccgactttactcacgatgcctgctgcttcggtgcctaatccgctgggtagcgatggcggcgggtaaaggccgctgcggatatatgtgtcgataaaattgatgccgatggctttattttcgacctggatttcattctccgccggatcggcaggagtgaactctacggcttgaagtacttccgggccaccgtgcttgtgaaattcaattcgtgttgccatgtgtcctccagaacgtatcgtcagggtctgcttcatatgataaagtttcgacccattctttatctcggtaactccattcactatggcaggaaataaacccttcaacaaacagcaggctgaaccccgcgaacgcgatccacaagttgccgggctgaaagtgcctccgcactcgatcgaagcggagcagtcggtgttgggcggtttaatgctagataacgaacgctgggatgatgtagccgagcgtgtggtagcagacgatttttacacccgcccacaccgtcatatctttactgaaatggcgcgtttgcaggaaagcggtagccctatcgatctgattactcttgcggaatcgctggaacgccaggggcaactcgatagcgtcggtggttttgcttatctggcagagctgtcaaaaaatacgccaagtgcggctaacatcagtgcctatgcggacatcgtgcgtgaacgtgccgttgtccgtgagatgatctcggttgcgaatgagattgccgaagctggttttgatccgcaggggcgtaccagcgaagatctgctggatctggctgaatcccgcgtctttaaaattgccgaaagtcgtgcgaacaaagacgaagggccgaagaacatcgccgatgtgctcgacgcaaccgtggcgcgtattgagcagttgtttcagcagccacacgatggcgttaccggggtaaacaccggttatgacgatctcaacaaaaaaaccgctggcttgcagccgtcggatttgatcatcgtcgccgcgcgtccgtcgatgggtaaaacaacatttgcgatgaacctcgtcgaaaacgcggcgatgttgcaggataaaccggtacttatcttctcgctggagatgccatcagaacagatcatgatgcgttctctggcgtcgctgtcgcgcgttgaccagactaaaatccgtaccgggcagctcgatgacgaagactgggcgcgcatttccggcaccatgggtattttgctcgaaaaacgcaatatctatatcgatgactcctccggcctgacgccaacggaagtgcgttcccgcgcacgccgtattgcccgtgaacacggcggcatcgggcttatcatgatcgactacctgcaactgatgcgcgtaccggcgctttccgataaccgtacgctggaaattgcagaaatctctcgctcgctgaaagcactggcgaaagaactgaacgtgccggtggtggcgctgtcccagttgaaccgttctctggaacaacgtgccgacaaacgcccggtcaactccgacctgcgtgaatctggctctatcgagcaggatgcggacttgatcatgtttatctatcgtgatgaggtgtatcacgaaaacagtgatttaaaaggcatcgcggaaattattatcggtaaacaacgtaacggcccaatcgggacggtacgcctgacctttaacggtcaatggtcgcgcttcgacaactatgcggggccgcagtacgacgacgaataataattattttatgaattaggtaattaaagcaaacacttatcaaggaacacaaatgcaagcggcaactgttgtgattaaccgccgcgctctgcgacacaacctgcaacgtcttcgtgaactggcccctgccagtaaaatggttgcggtggtgaaagcgaacgcttatggtcacggtcttcttgagaccgcgcgaacgctccccgatgctgacgcctttggcgtagcccgtctcgaagaagctctgcgactgcgtgcggggggaatcaccaaacctgtactgttactcgaaggcttttttgatgccagagatctgccgacgatttctgcgcaacattttcataccgccgtgcataacgaagaacagctggctgcgctggaagaggctagcctggacgagccggttaccgtctggatgaaactcgataccggtatgcaccgtctgggcgtaaggccggaacaggctgaggcgttttatcatcgcctgacccagtgcaaaaacgttcgtcagccggtgaatatcgtcagccattttgcgcgcgcggatgaaccaaaatgtggcgcaaccgagaaacaactcgctatctttaataccttttgcgaaggcaaacctggtcaacgttccattgccgcgtcgggtggcattctgctgtggccacagtcgcattttgactgggtgcgcccgggcatcattctttatggcgtctcgccgctggaagatcgctccaccggtgccgattttggctgtcagccagtgatgtcactaacctccagcctgattgccgtgcgtgagcataaagccggagagcctgttggttatggtggaacctgggtaagcgaacgtgatacccgtcttggcgtagtcgcgatgggctatggcgatggttatccgcgcgccgcgccgtccggtacgccagtgctggtgaacggtcgcgaagtaccgattgtcgggcgcgtggcgatggatatgatctgcgtagacttaggtccacaggcgcaggacaaagccggggatccggtcattttatggggcgaaggtttgcccgtagaacgtatcgctgaaatgacgaaagtaagcgcttacgaacttattacgcgcctgacttcaagggtcgcgatgaaatacgtggattaatcgttctgtaatatttgattgtctgtgccggatgcggcgtgaatgccttatccggccaataaaatcctaaaaattcaataagttgatgttctttcatgctcttataaaggtcgtgcctctggcggatgtacgtttgtcatgagtctcactctgttgctaattgccgttcgctcctgaacatccactcgatcttcgccttcttccggtttattgtgttttaaccacctgcccgtaaacctggagaaccatcgcgtgtttcaaaaagttgacgcctacgctggcgacccgattcttacgcttatggagcgttttaaagaagaccctcgcagcgacaaagtgaatttaagtatcggtctgtactacaacgaagacggaattattccacaactgcaagccgtggcggaggcggaagcgcgcctgaatgcgcagcctcatggcgcttcgctttatttaccgatggaagggcttaactgctatcgccatgccattgcgccgctgctgtttggtgcggaccatccggtactgaaacaacagcgcgtagcaaccattcaaacccttggcggctccggggcattgaaagtgggcgcggatttcctgaaacgctacttcccggaatcaggcgtctgggtcagcgatcctacctgggaaaaccacgtagcaatattcgccggggctggattcgaagtgagtacttacccctggtatgacgaagcgactaacggcgtgcgctttaatgacctgttggcgacgctgaaaacattacctgcccgcagtattgtgttgctgcatccatgttgccacaacccaacgggtgccgatctcactaatgatcagtgggatgcggtgattgaaattctcaaagcccgcgagcttattccattcctcgatattgcctatcaaggatttggtgccggtatggaagaggatgcctacgctattcgcgccattgccagcgctggattacccgctctggtgagcaattcgttctcgaaaattttctccctttacggcgagcgcgtcggcggactttctgttatgtgtgaagatgccgaagccgctggccgcgtactggggcaattgaaagcaacagttcgccgcaactactccagcccgccgaattttggtgcgcaggtggtggctgcagtgctgaatgacgaggcattgaaagccagctggctggcggaagtagaagagatgcgtactcgcattctggcaatgcgtcaggaattggtgaaggtattaagcacagagatgccagaacgcaatttcgattatctgcttaatcagcgcggcatgttcagttataccggtttaagtgccgctcaggttgaccgactacgtgaagaatttggtgtctatctcatcgccagcggtcgcatgtgtgtcgccgggttaaatacggcaaatgtacaacgtgtggcaaaggcgtttgctgcggtgatgtaatgcaggaaagcaggctggagctacccagcctgcagtgaaattaaactgtcgtcgctttcactctttctttatagatgatttttttgatgccatcgttctacgtgagagataataaacgttgttagttcttttattgttaagcttatcccaattatctggaattccttatcctgtttttttgggtggagtaataatttctgcacatctaaccattattaaatttaataataagtatcgggtttgttacgatagaatatttctatatcctcaagaatatgctttgccttattgcctgtgactttctgagattcaattatagtatcgttaaattctaatgttaaagagaactcttttttccgctttgtgtaagtttaaccttatattgattaccaatatcaaataaaaaggtcctgtaatgagaataatcacctttaacctcctcggcaaaacagcaaagcgtgcaaatatacataaagtctttcttacccctgattttgttaactaaatcaataaatgcgtgaaaaactttacttgcaatagaacttgatacttcttctccaggtctaaaaaatcttttgcaatttttaactgtgtttctatgtataaaaagaaatctttggcataagagatatctttattatttagtgcatctagctcaacaggtaaagatgtcgttttgttgctattcacatatgatatattcatatcatcatctccatcgcgagtaataaaattaatcaccattgtagggtagggggctggtcaatcagaaatcatctttataaacttcgattgtttttgtaatgctgtatcattaagttcattaaatcgtacagcagataaatgttctatcaaatttcgctcatttgccgaggattcatcataataaacgtaaaattaatgtatccttacatcgagtaataaacattttttatacaaaaaaagacaggaacgtatttactgggttaaatataatcatcctgcttttcatcacaaaaaccgcagataatccttcctttccccggcagctggcgttatggtcagatggtttttgcaacaaatctcacaataaaaagtttcaacatactgactatttagggaaaaatatgcgcaagatcacacaggcaatcagtgccgtttgcttattgttcgctctaaacagttccgctgttgccctggcctcatctccttcaccgcttaaccctgggactaacgttgccaggcttgctgaacaggcacccattcattgggtttcggtcgcacaaattgaaaatagcctcgcagggcgtccgccaatggcggtggggtttgatatcgatgacacggtacttttttccagtccgggcttctggcgcggcaaaaaaaccttctcgccagaaagcgaagattatctgaaaaatcctgtgttctgggaaaaaatgaacaatggctgggatgaattcagcattccaaaagaggtcgctcgccagctgattgatatgcatgtacgccgcggtgacgcgatcttctttgtgactggtcgtagcccgacgaaaacagaaacggtttcaaaaacgctggcggataattttcatattcctgccaccaacatgaatccggtgatctttgcgggcgataaaccagggcaaaatacaaaatcgcaatggctgcaggataaaaatatccgaattttttatggcgattctgataatgatattaccgccgcacgcgatgtcggcgctcgtggtatccgcattctgcgcgcctccaactctacctacaaacccttgccacaagcgggtgcgtttggtgaagaggtgatcgtcaattcagaatactgacagagcgggagagcgtgatgctctcccgaatgctgtttttttaatcacacctttatcctttcgctgtcttgctgcaaactgattaagagagttttatcaaggagcagcacatgtggtatcaaaagacgctcacgcttagcgccaaatctcgtgggtttcatctggtaacggatgaaattctgaatcagctggctgatatgccgcgcgttaacatcggcttactgcatctgttgctgcaacatacctccgcctctctgacacttaatgagaactgcgatcccaccgtacgccacgacatggagcgttttttcctccgcaccgttcccgacaacggaaattatgagcatgactatgagggagcagacgatatgccttctcatatcaaatcctcaatgctgggaacatcgcttgtattgccggtgcataaagggcgtattcagaccggcacctggcaaggcatttggctgggggaacatcgcatccacggcggatcgcgtcgcatcatcgcgacactacaaggggagtaaaaaatgaccatttcggagttgctacaatattgcatggcaaaaccaggcgcagaacagagcgtgcataatgactggaaagcgacgcagatcaaagtggaagatgtactgtttgcgatggtgaaagaagtagaaaatcgcccagctgtttcgctgaaaaccagcccggagctggcggagctgctacgtcagcagcacagcgatgtgcgtccaagccgccatctgaataaagcgcactggagcaccgtgtatctcgacggttcgctgccagattcgcaaatctattatctggtggatgcgtcttatcagcaggcggtgaatttactgccggaagaaaaacgtaaattgctggtgcaactctgaaaggaaaaggccgctcagaaagcggccttaacgattacagcatcggcttaaggaagcgtgccgtgtgtgatgcttcgcactccgcgacggtttctggcgtaccggagacgaggatctcgccgccaccactgccgccttctggtcccaggtcgacaatccagtcagcggttttgatcacgtcgagattgtgctcaatcaccacaatggtgttgccctgatcgcgcagtttatgcagtacgtcgagcagttgctgaatatcggcgaagtgcagaccggtggtcggctcgtcgagaatatacagcgtctgcccggtgccgcgttttgacagttcacgcgccagcttcacgcgctgggcttcaccgcctgaaagggtggttgcggactgccccagtcgaatgtacgtcaggccaacgtccatcaacgtttgcagcttacgcgccagtgcaggtacggcatcaaagaactcacgcgcctcttcgatggtcatatccagcacttcgtggatggttttgcctttgtacttaatctccagcgtttcacggttatagcgtttacctttgcactggtcgcacggcacgtagatatccggcaggaagtgcatctccactttgatcacgccatcgccctgacaggcctcgcagcgtccgccacgaacgttaaagctgaaacgtcccggcgtatagccgcgcgcacgggattccggtacgcccgcaaacagttcgcgcacaggcgtaaacacgccggtataggtcgccgggttagaacgtggagtacgaccaattgggctttggtcgatatcgatcactttatcgaaatgctccagcccctgaatatcgcgatacggtgctggttcggcgatggtcgccccattcaactggcgttgggcaatcgggaacagtgtgtcgttaatcagcgtcgatttaccggaacctgaaaccccggtgatgcaggtaaacagacccaccggcagcgtcagcgtcacgtccttcaggttgttgccgcgtgcgcctgtcagcttcagcactttttccggattcgccggaacgcgtttcttcggcacttcaatcttgcgtttgccgctcatgtactgcccggtcaacgactccggcaccgccataatcgcttccagcggaccttctgcgaccacttcaccgccgtgaacacctgcgcccgggccaatgtcgatcacatggtcagcggcgcgaattgcgtcttcgtcgtgctccaccacaatcacggtattaccgagatcgcgcagatggataagcgtacccaacaggcgctcgttatcacgctggtgcaggccgatagacggctcgtccagcacgtacataacgccaaccaggcccgcaccaatctggctcgccagacggatacgctgtgcttcaccgccagaaagcgtttctgccgagcgggaaagcgtcaggtaattcaggccgacgttaacgaggaatttcagacgatcgccgatctctttaaggattttttctgcaatcttcgcccgctgacctgcgagtttgagattgttgaagaattccatcgcatgaccaatgctcatgtcggagatagcaggcagcggcgtattctcgacatacacgtggcgcgcttcccgacgcagacgcgtcccttcgcagctggcgcacggacgattactgataaacttggctaattcttcgcgtaccgcgctggattccgtctctttatagcggcgctccatattatgcagcacgccttcgaacggatgacgacgaatggaggtatcgccacgatcgttcatgtatttgaattcaatgttttctttgccagaaccgtacaacaccactttatgcacgttcgcgctcaggctgccccacggcgcttcgacgtcgaacttatagtgatctgccagcgatttcagcatctggaaataatagaagttgcggcgatcccagccacggatcgcaccaccagccagcgacagttccggattctggatcactcgatcaggatcgaaatattgctgtacgccaaggccgtcgcaggtcgggcaggcccccgccgggttgttaaacgaaaacagtcgcggctccagttcacgcatactgtagccgcaaattgggcaggcgaagttggcggagaacagcagctcttccgctttcgggtcgtccatatccgccactaccgcggtaccaccggaaagctccagcgcggtttcaaatgactcggcaagacgttgggtaagatcgtcacgcaccttgaagcgatcaaccaccacttcaatggtatgtttcttttgcagttccagttttggcggatcggaaagatcgcagacttcgccatcaatacgagcacggatgtagccctggcttgccaggttctccagcgttttggtgtgttcgcctttgcgctctttaatgattggcgcgagtagcatcagacgcttgccttccggctgcgacagcacgttatccaccatctggctgacggtttgcgccgccagcgggacgtcgtggtccggacagcgcggctcgccaacgcgggcgaataacaaacgcaaatagtcgtggatttcggtgattgtccccaccgtagaacgcgggttatgagacgtcgatttctgctcaattgagatggcaggagaaagcccctcaatatgatcgacgtccggcttttccatcagtgacagaaactgccgcgcgtaggcggaaagggattcaacgtaacggcgctgcccttcggcatataaggtgtcgaaagcgagcgaggatttgccagaacccgaaagcccggtcacgacaatgagcttgtcgcgggggataacgaggttgatgtttttgagattatgggtgcgggcgccccgaacttcgatcttatccattcacctttcccggattaaacgcttttttgcccggtggcatggtgctaccggcgatcacaaacggttaattatgacacaaattgacctgaatgaatatacagtattggaatgcattacccggagtgttgtgtaacaatgtctggccaggtttgtttcccggaaccgaggtcacaacatagtaaaagcgctattggtaatggtacaatcgcgcgtttacacttattcagaacgatttttttcaggagacacgaacatggccagcagaggcgtaaacaaggttattctcgttggtaatctgggtcaggacccggaagtacgctacatgccaaatggtggcgcagttgccaacattacgctggctacttccgaatcctggcgtgataaagcgaccggcgagatgaaagaacagactgaatggcaccgcgttgtgctgttcggcaaactggcagaagtggcgagcgaatatctgcgtaaaggttctcaggtttatatcgaaggtcagctgcgtacccgtaaatggaccgatcaatccggtcaggatcgctacaccacagaagtcgtggtgaacgttggcggcaccatgcagatgctgggtggtcgtcagggtggtggcgctccggcaggtggcaatatcggtggtggtcagccgcagggcggttggggtcagcctcagcagccgcagggtggcaatcagttcagcggcggcgcgcagtctcgcccgcagcagtccgctccggcagcgccgtctaacgagccgccgatggactttgatgatgacattccgttctgatttgtcattaaaacaataggttatattgttttaaggtggatgattaaagcatctgccagccataaaaaagaagcctccgttatggaggcttctacgtatcaggtcaaaatcattggccattgtggcggtgtctgattcatctcttctatcatcaccgactcgatgttgtgccagatagcggtgatgtccgccattgtgatgccaagcaaccccattgcgaaccaacaggcggaaacaacgcccagaccgctgctgatcaccgcaagcccgacataatcagaccgacgaaaacggatgttgagtgtgctggccagaaacatcattacggcactaagaagttgccagcgaagaagaaccacgccagtggtgagggtagccatcaaacaattcctctgaaaagagccgatgccctggacagcgcggcgttgttcacgggaggcgtggtacactctggctatcgcggggcttgcagaacacaaaaatgaaacactctgtttgtttcattaattttgtgaactatatcacaattgattgtttgttagccatattaggccgtgacttttattgctgtacagattatgtggtttttcagtggcattaagggcatatcttcccgccgcctctgcattcctgtaggaaattaattttgaatatcaatgaattattttcatccaggtgacgattagaaaggtatcaatttcaaatcaggcaaaagtgctatttataccgtaagatttatctaaagacgtcggtacccagggttttcaccttgcaatggccgggtataaacaggcaggaaattgatagcaatgagtcatcgtgcacgacaccaattactggcgttgccgggcattatctttttagttctctttcccatcattctttcgctatggattgccttcctttgggcaaaatcagaagtgaataatcagctccgaacctttgctcaactggcactggataaatccgagctggtcattcgccaggcagatttagtgagcgatgcagctgaacgctatcaggggcaagtttgcactccagcccatcaaaagcgaatgttgaatattattcgtggctatctttatattaatgaattgatctatgcccgtgataaccattttttatgctcatcgctgatagcgcctgtaaacggctatacgattgcaccggccgattataagcgtgaacctaacgtttctatctattattaccgcgatacgccttttttctctggctataaaatgacctatatgcagcggggaaattatgtggcggttatcaaccctctcttctggagtgaagtgatgtctgatgacccgacattgcaatggggtgtgtatgatacggtgacgaaaacctttttctcgttaagcaaagaggcctcggcagcaacgttttctccgctgattcatttgaaggatttaaccgtacaaagaaatggctatttatatgcgacagtttattcgacaaaacgcccaattgcagccattgttgcgacttcatatcaacgtcttataacccatttttataatcatcttatttttgcgttgcccgccggtattttggggagtcttgttctgctattactctggctacgtattcgacaaaactatttatctcccaaacgtaaattgcaacgcgccctcgaaaaacatcaactttgtctttattaccagccaataatcgatatcaaaacagaaaaatgtatcggcgctgaagcgttgttacgttggcctggtgagcaggggcaaataatgaatccggcagagtttattccgctggcagaaaaggaggggatgatagaacagataactgattatgttattgataatgtcttccgcgatctgggcgattacctggcaacacatgcagatcgctatgtttctattaacctgtcggcctccgattttcatacgtcacggttgatagcgcgaatcaatcagaaaacagagcaatacgcggtgcgtccgcagcaaattaaatttgaagtgactgagcatgcatttcttgatgttgacaaaatgacgccgattattctggctttccgccaggcaggttacgaagtggcaattgatgattttggtattggctactctaacttgcataaccttaaatcattgaatgtcgatattttgaaaatcgacaaatcgtttgttgaaacgctgaccacccacaaaaccagtcatttgattgcggaacacatcatcgagctggcgcacagcctggggttaaaaacgatcgctgaaggcgtcgaaactgaggagcaggttaactggctgcgcaaacgcggcgtgcgctattgccagggatggttctttgcgaaggcgatgccgccgcaggtgtttatgcaatggatggagcaattacccgcgcgggagttaacgcgcgggcaataaaattacaggcggtggcgataatcgctgggagtgcgatcaaactgccgacggaaaacgcgggagaaggtctgctgcgagacataacccaggtccattgcgatatcaaaaatcggacgctcggtggtgcgcaactcaacggcggccagtaacaggcggcgttggcgaatgtaatcgccaagcgtctgatgcgtcaccgtgcggaacattcgttgcaagtaccactttgaatagcctgatttttttgcgactacatcaatgttaagcggctggtcaatatgctcgtcaatccatgcgataagatcctgaataattttctgatgggacataaatctgcctcttttcagtgttcagttcgttaattcatctgttggggagtataattcctcaagttaacttgaggtaaagcgatttatggaaaagaaattaccccgcattaaagcgctgctaacccccggcgaagtggcgaaacgcagcggtgtggcggtatcggcgctgcatttctatgaaagtaaagggttgattaccagtatccgtaacagcggcaatcagcggcgatataaacgtgatgtgttgcgatatgttgcaattatcaaaattgctcagcgtattggcattccgctggcgaccattggtgaagcgtttggcgtgttgcccgaagggcatacgttaagtgcgaaagagtggaaacagctttcgtcccaatggcgagaagagttggatcggcgcattcataccttagtggcgctgcgtgacgaactggacggatgtattggttgtggctgcctttcgcgcagtgattgcccgttgcgtaacccgggcgaccgcttaggagaagaaggtaccggcgcacgcttgctggaagatgaacaaaactaaagcgccacaagggcgctttagtttgttttccggtctttgtctttctctctatcccgctggtacacaggagggtttcccccgacgtcaacacacctcattcgagcacgtggtggaggttccggttggtgttgatgctttaattgtatgtcaccgacgtttcttcgccagtgtaaaagtatactttttaaccgcaatatttttgtcatctcagacgattttttatcgcaatcctgaacggtatacggctcgataacgctgcaatcttgcgcaccgacgataacgtttgcgcatcaattgcctggtttttcatcgtcaagacaataaaagagaaaaaagcagcaaacttcggttgaaaaagccgctatgatcgccggataatcgtttgctttttttaccacccgttttgtatgcgcggagctaaacgtttgcttttttgcgacgcagcaaattgtcgcaaacctggagcaggaagataacgtttcgctggcaggggattgtccgccacgcatcttgacgaaaattaaactctcaggggatgttttcttatgtctacgccatcagcgcgtaccggcggttcactcgacgcctggtttaaaatttcacaacgtggaagcactgtccgtcaggaagtggttgccgggttaacaacgtttctggcgatggtctactcggtcatcgtcgttccaggtatgttgggtaaagcaggcttcccgcctgcggcagttttcgttgcaacctgtctggttgccggactcggttctatcgtgatgggtctgtgggctaatctgccgttggcgattggttgcgccatctccctgacagcgtttaccgcattcagcctggtgctggggcaacatattagcgtacctgtcgcgctgggtgccgtgttcctgatgggtgtgctgtttacggtaatttctgccacgggtatccgtagctggattttgcgcaacttgcctcacggtgtggcgcacggcacggggattggtatcggtctgttcctgctgctcattgccgctaacggtgtcggtctggtgattaaaaacccgcttgatggtctgcccgttgcgctgggtgatttcgcgaccttcccggtgattatgtcactggtaggtctggcggtgatcatcggcctggaaaaactgaaagtccctggtggcattctgctgaccattatcggtatctcaattgtcggtttgatcttcgatcctaacgtccatttctccggcgttttcgccatgccttcattgagcgatgaaaacggcaattcactgattggcagcctggacattatgggcgcgctgaatcctgtagtcctgccaagcgttctggcgctggtgatgacggcagtatttgatgccaccggaactatccgtgccgtcgccggccaggcgaacctgctggataaagatgggcagatcatcgacggtgggaaagcactgaccactgactccatgagcagcgttttctctggcctggtgggtgcggctccggcagcggtatacatcgagtctgcggcgggtacggcggcgggcggtaaaaccggtttgacggctatcaccgttggcgtgctgttcctcctgattctgttcctctctccgctctcttacctcgttccggggtatgcaacggctccggcgctgatgtacgttggcctgctgatgctgagcaacgtggcgaaaatcgactttgctgattttgttgatgcgatggcgggtctggttacggctgtattcatcgtgctgacctgtaacatcgtaacaggcatcatgatcggcttcgcgactctggtgattggtcgtctggtttccggcgaatggcgcaagttgaacatcggtacggtcgttatcgccgtggcgctggtgaccttctatgcgggtggctgggctatctaatctttcatcggattctgaaaacgggtggcaatggctgcccgtttttattttctccgcacattgtgtgagcttttgcgatattctgaaaaaaatgagaattcaggcataacgtctttctcagatcataaaaaacatcgcaaacagggaacgcatggaaatcttcttcaccatactgataatgaccctcgtggtctcgctgtccggggtggtcactcgtgtcatgccctttcagatcccgcttccgcttatgcaaatcgccatcggtgcgctactggcgtggccgacgtttggtttgcatgtggagtttgatcctgaactctttttagtcttgtttatcccgccgttgctgttcgctgatggctggaaaacgccgacccgtgaatttctcgaacatggtcgagagattttcggcctcgcgctggcgctggtggtggtcaccgtggtcggcattggcttccttatttactgggtggtgccgggcattccgctgatccctgcctttgcgctggcggcggtgctttctccgaccgatgctgtggcgctctccgggattgttggcgaagggcgcatcccgaaaaaaatcatgggcattttgcagggcgaagcgttgatgaatgacgcctccggtctggtgtcgttgaagtttgccgtagcagtggcgatggggacgatgatcttcaccgtcggcggtgcgacggtcgaatttatgaaagtagccattggcggtattctcgccggttttgtggtgagctggctgtacggtcgctcgctgcgattcctcagccgctggggcggtgatgaacccgcgacgcagatcgtcctgctgttcctgctgccattcgcttcttatctgattgccgaacatattggcgtttccggcatcctcgctgcggttgccgccgggatgaccatcacccgctccggtgtgatgcgccgtgcgccgctggcaatgcgcctgcgtgcaaacagcacctgggcgatgctggaatttgtctttaacggcatggtgttcctgctgttaggtctgcagctgccgggtattctggagacgtcgctgatggcagcagaaatcgaccctaacgtcgaaatctggatgctgtttaccaatattattctgatatatgcggcgctgatgctggtccgtttcggctggctgtggacgatgaaaaagttcagcaaccgcttcctgaagaagaagccgatggagtttggttcgtggaccacacgagaaatcctgatcgcgtctttcgccggggtgcgtggggcgatcactctggccggtgtgctctctatcccgctgctcttgccggatggtaacgtcttcccggcgcgctatgagctggtgttcctggcggctggcgtcattctcttctcgctgtttgtcggcgtggtgatgttgcctattctgctacaacacattgaagtcgcggatcattcgcaacaattgaaagaggaacgtattgcgcgagcggcaacggcagaagtggcgattgtggcgatccagaaaatggaggagcgtctggcggcggataccgaagagaatatcgataaccagctgcttacggaggtcagttctcgcgtcattggtaacctgcgtcgtcgcgccgatggacgtaacgacgttgaaagttccgtgcaggaagagaaccttgagcgtcgcttccgtctggcggcattgcgttctgaacgtgctgaactttaccacctgcgcgccacacgggagatcagcaacgaaacgctgcaaaaattactgcacgatctcgatttgcttgaagcgttgctaattgaggaaaatcagtaagccgaaagcgacgtaaccaggcccgaggtaatctgaaaaaggtgcaatcttttgcacctttaacaggttagctcgggctaacattcatgattctaaaacaaataaattatctctcttttaaagtcaattcattggctgttcttcgacttaacctcaatctgcatcttgcataatatctgcagtaatcttcatagcgactgcatgaagattatcctcagtttgtgacatgccagtatgagtggcacaatcttcttcaaagaatttctgtagtgttaccaggatatcactattaatggagatattttcctcaccacggagaatggtaatacccattccctggacgctagcctcatcgaaattaacacgatagagacggatattaaacatccaggcttttgttaaaacagaacagttgaaatggcaattgcttaaattggcattattaaaattaacattagccatattagagtcggtacatataaccatttcgaggaacgtatttgttaaccgcgtaaaaaagagtttgctatcaattaagtttatattctggagggttgctttattcaggttgacacgagacagatcagcatgttcaaagttaattaaatcaagtttagagaagctaaggtcggctctaaataaattaatatatggcgctattactttataaagatttacctcagccatgtatgccatataaaaatttgaataatcaaggaaggtatttttaatattggctctattcattgttgcattgtagaattgaacatgcatagcggaacatgaatttagagttccgtcagtcatttttatctgagcgaaatttgagtcatcgagaatacaattatcaaaaagtattttttccattatggcgaaattaaaattcgttttatacatattacagtcctgaaaaatagcgttttgtagtctgcaacctgcaaaattcgaattggataaatcttcatctttaatcacgatacctttcaggctaaggtgtgaaaaatcgtaaccaccatttactgtctgtgggatttcgatagtattattatggacggtgacattatttataaaatataccaccttaattgacacttccttatctttattaaggtaaactcttctcgtaattctatcgtcacatttattatttgcatgtgaagctatatctataaaatatttatgtattttcctgtccgtttctttcgtgatttttcctgatggtaaactatcataaattcttttcattttctgaatcaagcctatcactttttcatgatcatccattttgaaaagagagagggctttattgtcaattaacgtgtttttatgatgtttgctgtaattatctgattttgttttctttgtatgtgatggacttgtgacagagtggttatcgttaatcaggcaaagagggaaaaacatattatttaaaccattatagcgcataaaatatccttataattaacaagaaagaaaaggcatattctctgcattatcattttctacgactgtcaaaaatcgctcattttttaatgagtttatttgtttaatattatgggaaaaggtgatgcatttgggagaggaagagtattccccggtcagacgaccggggaaggggagagattaatgcgcgcggccttgctcaacgccaaagccggtctgggagcggataaactgcgcgcggaacagttcacgctcacgcgcgccttccgctgagttatcggttgccgagaagaaccagatgccgaggaatgccacggtgatagagaacagcgccgggtattcatacgggaagatggctttttcgtgaccaaggatctgtacccaaatcgtcgggccgaggatcatcagtactactgcggtaatcagccccagccagccacccatcatcgcgccacgcgtggtcagtttcgaccagtacatagaaagcagaatgatcgggaagttacagctcgccgcgatggcaaacgccagccccaccataaaggcgatgttctgattctcaaacagcacgccgaggataatcgcaatcacgccgaggatcagtacggtgatttttgatacccgcagctcttcacgttcggtcgcgccttttttgaagacgttagcgtacaagtcatgcgaaaccgcggatgcgcccgccagcgtcagacccgcaaccaccgcgaggatagtggcgaaagcaaccgctgaaataaaaccgaggaacaggttgccgcccactgcattcgccaggtgaacggccgccatgttgttaccaccaatcagatggcccgccgcgtctttatattccggattcgcaccaaccagcatgatcgcgccgaagccgataataaaggtcagaatatagaagtagcccataaacccggtggcgtagaacacgctcttacgtgcttcgcgggcatcgctgactgtaaagaagcgcatcagaatgtgcggcaagcccgccgtaccaaacatcagtcccagacccagagagagcgcggagatcggatctttcaccagcccgcccggcttcatgatgtcgacacctttcgggtgtaccgccatcgcttcactgaacagattgttgaagctaaagccgacgtgtttcatcaccataaaggccataaagctggcaccgaacagcaacagcacggctttgataatttgcacccaggtggtcgccagcatgccgccgaacaggacgtacatcatcatcagcacgccgaccagcaccaccgcaatgtgatagttaaggccaaacagcagctcgatcagtttacctgcgcccaccatctgggcgataaggtaaagcgccaccaccaccagagaaccacaggccgaaagaatacgaatcggcccttgtttcagacggtaagaggccacatcggcaaaggtgtagcgccccaggttacgcagacgttcggcaatcaggaacaaaatgatcggccagcccaccaggaagcccagcgagtaaattaagccgtcatagccggaggtaaacaccagcgcggagatccccaagaatgaggcggcggacatatagtccccggcaatcgccagcccgttctggaagccagtgatattgccgcctgcggtgtagtagtcgctacgagaacgtacgcgttttgatgcccagtaggtaatgccgagcgtaaacacgacgaaaatcaggaacataataatcgcctgccagttcgttggctggcgctctacggccccgctaatagcatccgcggcgttagctgcgaaagggagtgtggcggcaagcgccgtcagaactcttttcatgatgcttgtacctcatgcaggacttcattattaagacggtcgaattcgccgttcgcccgccagatgtagataccggtgagaacaaaggagatcacaatcactccaacaccaattggaataccgcgtgtgacgctggtgttcggattcagcggcgtgcccagccagccgggcgcgaaggcgatcagtaaaataaagccgatataaactgccagcataataatcgacaggatggtggcaaaccgttgccgtttttcgactaactccctgaaatgcgcattgtcttctatccgctgataaatagtgccattcatcacagattctccagaggtaatgtagggattgttttaattcccgctcccttatgggagaaggttaacgctcgggtaacccttgccgaatgtaggccggataaggcgtttacgccgcatccggcaatcaatgcctgatgcgacgctgtcgcgtcttatcaggcctacaaaccgttaccgactcgcatcgggcaattgtgggttacgatggcatcgcgatagcctgcttctcttcaagcagcttctcgactacgccaggatcggcaagcgtcgaggtatcgcccaggttgctggtatcgcccgccgcaattttgcgcagaatacggcgcataattttgccggagcgggttttaggcagggagtcggtccagtgcagcacgtctggcgtcgccagcgggccaatctctttacgcacccagttgcggacttctgcgtacagttctggtgacggttcctccccgtgattaagcgtgacgtaggcgtagatcgcctgacctttaatattgtgcggaatacctactacggcggcttcggcaatcttcggatgcgccaccagcgccgactcaatctctgccgtccccagacggtgaccggagacgttcagcacgtcgtccacacgcccggttatccagtaatagccatcttcatcgcgacgcgcgccgtcgccgctgaaatacatatttttgaaggtggagaagtaggtctgttcaaaacgttcgtgatcgccaaacagcgtacgcgcctgacccggccaggagtcggtgattaccaggctaccttcggtggccccctccagcgggttaccttcgttatcgaccagcgccggttgcacgccgaagaacggacgtgttgccgaaccggctttcagctcggtagcgccaggcagcggggtgatcatgaaaccgccggtttcggtctgccaccaggtatcgaccaccggacatttctcgttgccgatttttttccagtaccactcccacgcttccgggttaattggctcgcccacggaaccgagaatgcgcagcgacgaacggtcggtgccttcgatcgctttatcgccttccgccatcagcgcgcggatcgccgtgggtgcggtatagagaatattgacctgatgcttgtccaccacctgcgccatacgggcaggcgtcggccagttgggtacgccttcaaacatcagcgtggtcgcaccgcaggccagcgggccgtacagcaagtaactgtgtccggtcacccagcccacatcggcggtgcaccagtagatatcacccggatgataatcaaagacatatttaaaggtcagcgccgcgtacaccagataaccgccggtagtatgcagcacaccttttggcttaccggtagaaccggaggtgtagagaataaacagcggatcttcggcgttcatctcttccgcctggtgctgatcgctcgcttgctcaaccaggtcgtgccaccacaggtcgcgcccttcctgccagtcaattttcccgccagtacgcttcagtaccaccacatgctctacgctggtgacgttcgggtttttcagcgcgtcatcaacgtttttcttcagcggaatactgcgcccggcacgcacaccttcgtcggaagtgatcaccagtcgtgagttggaatcaataatgcgcccggcaacggcttccggcgagaagccgccgaaaatcaccgaatgcaccgcgccaatgcgggcgcaggccagcatcgcaaccgcggcttccggcaccatcggcatataaatcgccaccacatcaccttttttaatgcccagctcgagcagggtattggcgaagcggcagacgtcgcggtgcagctctttatagctgatatgtttgctctggctggcgtcgtcgccttcccagatgatggcggtacgatcgccgttttcttgcagatggcggtcaaggcagtttgccgccagattcagcgtgccgtcctcgtaccatttaatggacacattaccgggggcaaaggaggtgtttttcaccttctggtaaggtttgatccagtcaagaatttttccctgttcgccccagaaggtatcaggtacgttaatagattgttgatacatcgcctcgtactgctgagggtttatcaggcaacggtctgcgatgttggcaggaatggtgtgtttgtgaatttggctcatgcttttgttctccttgtaggatgttaataatatgtggcataagcgttaaatgtaggggtattggcagttttgtttagtatttgggcgacagatcacgcaaaagtagaattgtgcaaataaacggcagggtaatttttgaaggtcagcaacaaaagttgattaattctttgaggaacatgcagttatgcatgctgttgaaaaagaggaagatactgactaactctaaagtggtattttacatgcacttacaattgattaaagacaacattcacagtgtggttatttgttacacataggggcgagcaatgtcatgacagtgtaggtgcggttactgtcgtgaaaaacaataaaaaccgccattgcaacaatggcgcaattcggatgaagcccctatgacaaggataaaaataaacgcacgccgtatcttcagcttattgattccttttttctttttcacttctgttcacgctgaacaaacggctgctcccgcaaaacctgtaactgtggaagcgaagaatgaaacctttgccccgcagcatcccgatcaatatctctcctggaaagccacctcggaacagtcagagcgtgttgacgccctggcggaagatccacggctggtgatcctgtgggcggggtatcccttctcgcgcgattacaacaagccgcgtggacatgcttttgctgtgaccgatgtgcgtgaaaccctgcgtaccggtgcgccgaaaaacgctgaagatggtccgctaccgatggcatgctggagttgtaaaagcccggatgtggcgcgtctgatccagaaagacggcgaagatggctacttccacggtaaatgggcgcgcggcggtccggaaatcgtcaacaacttaggttgtgccgattgccataacaccgcctctccagagttcgccaaaggcaaaccggagttaaccctttcccgtccgtatgcggctcgcgcgatggaagccattggtaaaccttttgagaaagccggacgtttcgaccagcaatcgatggtttgcggtcagtgccatgtggagtattacttcgacggcaaaaacaaagcggttaaattcccgtgggatgacggcatgaaagtcgaaaatatggagcagtattacgacaaaattgccttctctgactggactaactccctgtcgaaaacgccaatgctgaaagcgcagcacccggaatatgaaacctggacagcgggcattcacggtaaaaacaacgtgacctgtatcgactgccatatgccaaaagtgcagaacgccgaaggcaaactctacaccgaccataaaattggtaatccgtttgataacttcgcccagacttgtgcgaactgccatacccaggacaaagctgccttgcaaaaagtggtcgcggaacgtaagcagtcgattaacgacctgaaaatcaaggttgaagatcaactggttcacgctcacttcgaagcgaaagcagcgctggatgcaggcgcgacggaagctgaaatgaagccaattcaggacgatatccgtcatgcccagtggcgctgggatctggcgatcgcttcccacggcattcatatgcacgcaccggaagaaggtttacggatgctcggtacggcgatggataaagcggcggatgcacgcaccaaactggcgcgcctgctggcgaccaaaggcatcacccatgaaatccagatcccggatatctcaaccaaagagaaagcccagcaggccattggcctgaacatggaacaaatcaaggccgagaagcaggacttcatcaaaacggtgatcccgcagtgggaagaacaggcacgtaaaaacggtctgttaagccaataaccccgttccgcctcgcaaggggcggaaaacacaatggagtgaatatgagcgtattacgttcgttattaactgccggggtgctggcgtcgggcctgttgtggagcctgaacggaattaccgctacccctgcggcgcaggcatctgatgatcgctacgaagttacccagcagcgtaacccggatgccgcctgtctggactgtcataaaccagataccgaaggtatgcatggaaaacatgcttccgttatcaacccgaataacaaactgccggtcacctgcaccaactgtcacggccagccatcaccgcaacaccgcgaaggggtgaaagatgtgatgcgctttaacgagccgatgtacaaggttggagagcagaacagcgtctgtatgtcctgtcatctgccggaacagttgcaaaaagcgttctggccgcacgatgtccacgtaaccaaagtggcgtgcgccagctgccattccctgcatccacagcaagatacgatgcagacgttaagtgacaaaggacggattaagatttgcgtcgattgccacagcgatcagcgcaccaatccgaactttaacccggcgtctgttccgttgcttaaggagcagccatgacctggtctcgtcgccagtttctcaccggcgtcggcgtgctggcagccgtcagcggcaccgcagggcgcgtggtggcgaaaacgttgaatatcaatggggtgcgttacggcatggtgcatgacgagtcgttatgcatcggctgtaccgcctgtatggatgcttgtcgggaagtgaacaaggtgccggaaggcgtctcgcgcctgacgattattcgtagcgagccgcagggcgaatttcctgatgtgaaatatcgcttcttccgtaagtcttgccagcactgcgatcatgcgccgtgcgttgacgtctgcccgaccggtgcgtcttttcgcgatgctgccagtgggattgtcgatgttaatccggatctctgcgtcggttgtcagtactgcatcgccgcctgtccgtaccgcgtgcgctttatccatccggtcacgaagacggcggacaaatgcgatttctgccgtaagaccaatttgcaggccggtaagttgcccgcgtgcgttgaagcttgcccgaccaaggcgctgacgtttggcaatctggacgatcccaacagtgagatttcgcaactgctgcgccagaagcccacttaccgctacaagctggcgctgggaaccaaaccgaagctgtaccgcgtaccgtttaaatacggggaggtgagccaatgacgcagacttccgcatttcattttgaatcgctggtgtgggactggccgattgccatctacctgtttttgattggtatttctgctggtctggtgacgctggccgtgctgttacgtcgcttctacccgcaggcgggcggtgcagacagtacgttgctgcgcaccacgctgattgtcgggccgggcgcggtgatcctcggtctgttgatcctcgtcttccacctgacaagaccgtggaccttctggaagctgatgttccactacagttttacctcggtgatgtcgatgggggtgatgctgtttcagctctacatggtggtgctggtgctgtggctggcgaaaatctttgaacatgatttgcttgccctgcaacaacgctggttgccgaagctggggatcgtgcaaaaggttctgagcctgctgacgcccgttcatcgcggactggaaacattgatgctggtgctggcggtgttgttgggggcttataccggctttctgctgtcggcgctgaaatcgtatccgttcctcaataacccgatcctgccggtgctgttcctcttctccggcatctcgtccggtgcggcggtggcgctgatcgccatggcgatacgccaacgcagtaacccgcattccacggaagcgcagtttgtacaccgtatggaaatccctgtggtatggggtgaaatcttcctgctggtggcgttttttgtcggtctggcgctgggcgatgacggtaaagttcgtgcgctggtggcggcattaggtggcggtttctggacgtggtggttctggcttggtgtcgccgggctggggctgattgtgccaatgctgctcaaaccgtgggtcaatcgcagttccggcattcctgccgtgctggcggcgtgtggggccagtctggtcggcgtgttgatgctgcgctttttcattctctacgccggacagttgacggtggcgtaagccagaaaagaggtggtttctggacgtattccttcctgaagtcggttttctggcgttgttgttaagtctcggggtcaacgtgttgaccccgttgacggccttcgcgggagtgcggttgcgctggcctgccatgatgcgactcacttgcatcggcattctggcgcagttcgcgctcctgctgctcgcctttggcgtactgacgtattgttttctcatcagcgatttctcggtcatttatgtcgcgcaacatagctatagcctgctgtcgtgggaactcaagctggcagcggtgtggggcggccatgaaggttcgctgctgctttgggtgctgctgctttccgcctggagcgcgctgtttgcctggcattatcggcagcaaaccgatccgctatttccgctgacgttagccgttttatctctcatgctcgccgcactgctactgtttgtggtgctgtggtccgatcccttcgtgcggatatttccaccagcaatcgaaggccgcgatctcaatccgatgctgcaacatcccggtcttatctttcatccaccgctgctttaccttggctatggcggtttgatggtagcggcgagcgtggcgctggcgagtctactgcgcggcgagtttgatggtgcctgcgcccgaatttgctggcgctgggcgttacctggctggagtgcattaacggcggggatcatcctcggttcctggtgggcctactgcgaactcggctggggcggctggtggttctgggatccggtggaaaacgcctctttattaccctggctttctgccactgcgctgctgcacagtttgtccctgacacgccagcgggggattttttgccactggtcgctgttgctggcgatagttactctgatgctgtcgctgctgggcaccttaattgtccgttctggcattctggtttcggttcatgcgttcgcgctggataacgtccgcgccgtgccgttgttcagcctgtttgcactgattagccttgcgtctctggctctgtatggctggcgagcgcgggacggtggcccggcggtgcatttttcggggttatcgcgggaaatgttaatcctcgctacgctgttgctgttttgcgcagtgctactgatcgtgctggtgggaacgctttatccgatgatttacggcctgctgggctggggacgcctctccgttggcgcgccgtattttaaccgcgcgacgttaccgtttggtctgttgatgctggtggtgattgtgctggcgacgtttgtctctggcaaacgcgtgcagcttccggcgctggtagctcatgcgggcgtgctgttatttgccgctggggtcgtggtctccagcgtcagccgtcaggagatcagcctgaatttacagccgggtcagcaggtgacgctggcaggatacaccttccgttttgagtgcctcgatctacaagccaaaggcaattacaccagcgaaaaagcgatagtggcactgtttgaccatcagcaacgcattggtgaactgacgccggagcggcgtttttatgaagcacgccgtcaacaaatgatggaaccgtcaattcgctggaacggcatccatgactggtatgcggtcatgggggagaaaactgggccggatcgttacgcttttcgtttgtatgtacaaagcggtgtgcgctggatctgggggggaggattgttgatgattgcgggcgcattgttaagcggatggcgggggaagaagcgcgatgaataaagggcttctcacgctactgctgttatttacctgttttgcgcacgctcaggtcgtagacacctggcaattcgccaatccgcaacaacagcaacaggcgttaaatattgccagccagttacgttgtccgcagtgccagaatcaaaacttactggaatccaacgcgccggtggctgtcagtatgcgccatcaggtttacagcatggtggcggaggggaagaacgaagtcgaaatcattggctggatgaccgaacgctacggagattttgttcgctataacccaccgttaacgggtcagacgctggtgttatgggcgctgccagtggtgttgttactgctgatggcactgatcctctggcgagtgagggcgaagcgatgaaacagcccaaaataccggtgaaaatgctgacaacactcacgatattgatggtatttctctgtgtcggcagttatctgttaagcccaaaatggcaggcggtacgtgcggagtatcagcgtcagcgcgatccgctacatcagtttgccagccagcaaaccccggaagcgcagcttcaggcattgcaggataaaatccgcgctaatccacaaaacagcgaacagtgggcgttactgggcgagtactatctgtggcaaaacgattacagcaattcgttgctggcgtaccgtcaggcgttgcaactacgtggtgagaacgctgaactgtatgcggcgctggcgacggtgctttattaccaggccagccagcatatgaccgcccagactcgcgcaatgatcgacaaagccctcgcgctggacagtaatgaaatcaccgccctgatgctgctggcttccgatgcgtttatgcaggcgaactacgcgcaagccatcgaactatggcaaaaagtgatggatctcaactcaccgcgagttaaccgaacacagctggttgagtcgattaatatggcgaaattgttgcagcggagattggattaatcatctggtgatgaagattatgtcattgagctgcataaaaaataatcgaatgaacatatgccaaaaataatcactaatcagtattattgcagattaaacaaataaaaatctttccataacaaatggttattcattaatcctgccataaactcgcgttattatgcattaatgcagcgaaaagctctgttgttaaagggttgcgcaacataccgcgcaaatgatactgatcataagcgttaaaaaaatctacaaaccaacgcaacacaattcatgccctggcagtatgtcacgttctcgcgtttctgaacggggaacggcgctccattgaggaagtcattcatatgaaaaatataaaattcagcctggcctggcagattctgtttgctatggtgctgggcattctcctgggaagctacctgcactaccatagcgacagccgcgactggctggtcgtcaatttgctctctccggcgggtgatatcttcatccatctgattaaaatgattgttgtgccgattgtgatctccacgctggtggtgggtatcgcgggtgttggtgatgccaaacagctcgggcgtattggcgcgaaaaccattatctacttcgaggtgatcaccaccgtcgccatcattttggggatcactctggcgaacgtcttccagcccggtgccggggtggatatgtcgcagttggcgaccgtcgatatctcgaaatatcagagcactacggaagcggtacaaagcagttcccacggcattatgggcacgattttgtcgctggtgccgacgaacattgtggcgtcgatggcgaaaggcgaaatgctgccgatcatctttttctcggtgctgtttggtctggggctttcttccctgcccgcgacgcatcgtgaaccgctggtgaccgtgttccgctccatctctgaaaccatgtttaaagtgactcacatggtgatgcgttatgcaccggtgggtgtgtttgcgctgattgcggtgacggtggctaactttggtttctcgtctctgtggccactggcgaaactggtgctgctggtgcatttcgccattctgttcttcgcgctggtagtgctgggaattgtggcgcgcctgtgcgggttaagcgtctggatcctgattcgtattctgaaagatgagctgattctggcgtactccactgccagctctgaaagcgtgctgccgcgaattattgagaagatggaagcctacggagcaccggtgtcgatcaccagtttcgtggtgccgaccggttactcttttaaccttgatggttcgacgctgtatcaaagtattgccgctatcttcatcgcgcagttgtatggcattgacctgtccatctggcaggaaatcattctggtgctgacgctgatggtgacctcgaaagggattgctggcgtgcctggcgtgtcgtttgtggtgttgctggcaacgctgggtagcgtaggtattccgctggaaggtctggcgtttattgctggtgttgaccgtatcctcgacatggcgcgtactgcgctgaacgtggtgggtaatgcgctggcggtgctggtgattgccaagtgggaacacaaatttgaccgtaagaaagcgctggcttatgagcgtgaagtgctgggcaaatttgataaaactgcggatcaataattgaagattgccggggatatccacccggcaatgtgtgaatgcctgatgcgacgcttgccgcgtcttatcaggcctacgccagacagcgcaatagcctgatttagcgtgattttgtaggtcggataaggcgtttatgccgcatccgacatcaacgcctgatgcgacgcttaacgcgtcttatcaggcctacgccagacagcgcaatagcctgatttagcgtgattttgtaggtcggataaggcgtttacgccgcatccgacatcaacgcctgatgcgacgcttgccgcgtcttatcaggcctacgccagacagcgcaatagcctgatttagcgtgattttgtaggtcggataaggcgtttatgccgcatccgacatcaacgcctgatgcgacgcttaacgcgtcttatcaggcctacgccagacagcgcaatagcctgatttagcgtgattttgtaggtcggataaggcgtttacgccgcatccgacatcaatgcctgatgcgacgcttgccgcgtcttatcaggcctatcttaaccgttggttaatttttcaaactcttcacacccggtatcaaacccttccatacagctcaggttcaaccagtgcagcgccttttgcttgttcttctcgataaaaccttcttcaccgtttaagaacatcattcccgcccagtactcggaataaccggttcgggaaattgcagagctgcgtttgaaataccaggttgccttgtcatcgtcggccttaatgcccacgccgttggcgtaaatcaaaccaagcagcatttgggcatcgacggcagagtcgttctccagatcttccgaggcgttttctaacagcgaaattgcctttggataatccggtttacccgcttgagtatttaccagaatatgcgccagcgttacttcaccttctttactgcccgcttgcgccgctttctctgcaagaacttttgcttgtggatagtccagactgaccggattggtgattttgatctgcgccagcagcgcgcaggcatcagcatcaccgctgtcggcggctttctgtgcccaatattcggctttgctcaaatcgccggagctaaaccagctgtcggcaagaaaatattgtgcgcgtcggtccccggcctctgctgcctttaaatactggctgccaggctcggagtcgttggcgtgggcaaagaatgtcaaaaacaacatcaatgcgataatttttttcattttgataatacgattgggtagggagtaaccagtataaagagttcgaatggataaaaaaacagcctccgaaaggaggctgtagaaaggacggtattacgccagtgccgcttcgcgcaggcgagttttcaacttgttgtactcgtcaatcacgtactgctcggcggcgcgctgatcggcgatcggctcgacgcgaacggcgcagtatttgtactccggcgttttcgtaatcgggcttaagttttcggtaaccagctcgttacaggcaccaatccaccactggtaggtcatgtaaatcgcccctttgttcggacgatcgctgacctgcgcacgggtgataattttgcctttacgcgagtgcacccaaaccaatgcctcatcttcaatacccagacgtttggcgtcttcggtattgatttgtgcgtagccaggttcatcagccagcgccgccagtgccgcacagttaccggtcatcgaacggcaagagtagtgaccaacttcacgcaccgttgacagtaccatcgggtactcgtcggtgagtttgtcgattggcgctacccagtcgcaggtgaagaactgcgccagaccgttcggggtatcaaacttctctttaaacagataagaagtcccctgatcggcatctgaagtatcgcggcaaggccactgaatgaagcccagttcgcccattttctcgtaagtcgcaccgtagaaatccgggcacagatgacgcaactcatcccagatctcctgggtgttgttgtagtgcatcggataacccatacgggtggcgatttcactgatgatttgccagtccgttttcagatcccatttcggttcaaccgccttgaagaaacgctggaagccacggtcagccgcagtaaacacgccttcatgctcgccccacgacgttgacggtaaaataacatccgccgccgacgcggttttggtcataaagatgtcctgaacgataaccagttccagatcttcaaaggctttacgtactgccgacagctccgcgtcagtttgtagcggatcttcgcccataatgtacgcggcacgcacttcgccatgcgctgcgcggtgcggcagctcgctgatgcgatagccggtatgcgctggcaggctttccacgccccaggctttggcgaatttctcgcggttagccggatctttcacgtactggtatcccggatacgtatccggcagcgcgcccatatcgcaggcaccctgaacgttgttctgaccacgaaccgggttaacacccgcatgcggcttaccgaggttaccggtcagcatcgcgaggctggtcagagaacgcacggtttccacgccctggtagaactgggttacacccatgccccacaggatggcggcgcttttcgcctgggcatacatccgtgccgcctgacgaatctcactggcgctgacgccggtgatatcttcaaccgactccggcgtgtagccttcaacgattttacgatactcttcaaagccttctgtacgtgaagcgacgaacgctttgtcgtacagattttcttcaataatgacatggcccatcgcattcaacagcgcgatgttcgagccgtttttcagtgcaatgtgcatgtcagcaatgcgcgcggtttcaattttgcgcggatcgcagacgataattttcgccccgttacgtttagcgttaattacgtgattcgccacgattgggtgggaatccgccgggttgtacccgaaaacgaacactaaatcggtattatcaatttcgttaatagcattgctcattgcgccattaccgaccgattggtgcagacctgcaaccgatgggccgtgtcagacacgagcgcagcagtcaacgttattggtaccaataacggcgcgcgcaaatttttgcattacatagttggtttcgttacccgtaccacgcgaggagccggtcgtctggatggcatccggaccgtacttctctttgatggcgctcaggcgctcggcaacgtaattcagtgcctcatcccaggaaacaggttcgagtttgccgccacgctggcgacggatcatgggggttttcaggcgcggggtcaggatctgggtatcgttaatgaagtcccagccataataacccttcagacacagggtaccctggttggttttcccctgcgctgcctccgcccggacgattttgccgttatcgacgaccaggttgattttgcaacctgatgcgcaataggggcaaaccgtgacgacttttttcatcggtctcgctccagttaatcaaatcacgcatacgcgctctcgactacagtatgcatcttttatgccacattttatgtggggtcattccctgatattacgggcactatttattcaaaactctgacgaaaaacaggctgtcgtcagttttgacgtgacgaaacgaaataccgcgtgacagccatcacgcggcagacattttattttttctcgacgacgggacctgcctgatacccgccgcccagcgatttcatcaactgaatgctttggatcacccggcggctgtccagcatcagtaatgacatctcttcggcaagcactggcaaccgggcttcggtggcctgtaagcggctggttaagccgcgctgataggcggcctcggcagcgcgctgggtaaagcgcgtggcttccacgcgttcagcctgcatttctcgctcgtcgttgagcgtttgcagacgcgtgccgttgacggcaacgtcacgcaccgcgttcagtactgactggttgtaacgttcaatcatcatgttgctggcggcgcgcgtgccttcgagattggcattcaaccgtccaccgtcaaacagcggcaatttcagacccgggatgaagttgaactggcgactggtttttttgaataaggtatgcagatggatggagtccagaccgaaaaacgctttgatatcaaagctcggatagaacaacgcccgcgcggaatccacctgatctaatgacgcctgaacataccagcgcatggcttgcagatccgggcgtctggcgagcaactcataagagagtgtcgccggaatgccggtctggacttgcggtaatgccaccggtctgatctccggcatatcgctggctcccgcgccaatcaatgcacgcagagattctcgcgtttcggtgatttgccctttgacggcaacaatttgtttatcgaccgccagaatctgtgcccgcgcgccgtggaaaggcacttgcgcttccagaccgtgcgccactttactctggtgcgctttcaccgcgtaatcaatcacatcgtgagtttgttctaacagatcgagcatctgatagctggcctgcatactgtaataaagctgcgctacgcccgtggccagcgatagctctactgctgcggtttctgccagcgcggcattatgcgcgccaatggcggcggcaaccgctgagcgatgcacaccccacaaatcaagatccagtccggcaaacaaacctactgtggcttccgtatagtacggcccgtccatacccagtgctggcgcatccattgaataagggcttaaaaagccgttcgccgagacacgttggcggttgagcatccctaacgctgcgacctgtaattgtgaaccggcatctaacaaatcggcctgggactgcgctttttcttcccgcagtttcgcttcggcgagggtgtgtgaaccacttagcgtccgttggatcagcgcatccagctgcgggtcattgagttgtttccaccactgcgcctgcggccagccggagctggcaagatgaatatcgtcggccagtttgatttgttccggtttgagctgttgatgaggtgcagaatccttacgtaccagggcacagccggaaatcagcgtcgtgctgccgagaatgctgcacaacagcagacgtgaaagttgacgattgatcattgcgtggctccttgtgcctgttccgtggcgggcgttaatgccggggctgtccagtctggcaagcgggcgaaaagctggcagacgtgttgctcctgttttaataaggtgggcaggatggcctgagaggcgggtgtctcttcaagcgttatttgaggagaacggctgagtgcggttgccagaccggcagcgtatttctccagggcgtcggcaaactgacctgctctgtccggctgtagtgcgttatccagcgcctgcgccgagttccaggtggcatcccaggcgtgaagaagatcgcggccctgacgaataaccgtttgcgaacgttcaatcagtaatgcgcgttcttcgctgtccagttgacgctccagcgccacgcgttggcacatctcttcacaggcattaaacgccgcatgcagaccgatacgaatttgcagataagtgcgcagagccgtgacttcctgctggcgtgggatccgcattactttacttaacatacccagcgtgccagccagtttttgcggcagtgtgcgcgcttcactttcaggccagacaaaggtgtaaatcaccgcggacaccacggtaccaatgatgatacccagggcgcgatcgcgaatttccaccaggtcgtacactgggccaaaaacgttttcgagcgtggcgagcgcgaaggtgaccaccatctgtgtgccgatataagaagagcgttcagagctggtggcaatccatgcgcccaacaggaaaatcggtgccagcacaaacagcaattcgacaatattgtccagccagggcatgaccagtagcgtgaataacagcgccagaatcgcgccgcaaaaggccccgccaaaacgcagcaccatcttctggtacgacgaaccgacatttgggttagcgacgatcacgcatgtcagcatacaggtgtgaatgccttcccagtccacgccgctgtaaaaggtgtaacagatcaaacaggcgagcagcgtttttaccgcgtagcgcatatagtctggattggtaaaagcatcggcggccattgatggcggtttggctgcgggcgttggcggcgtattcgggtccatctgacccagttgtaacaacgtctggcagatattctccaggttacattcccgtgccgccatcgcttcactttcactgatccgccagtcgctttgccagcactgaccttcagcaacggcatgctgcagcttgttgatttctgaagctaatttttgtcggaattcaataattgcctgagaatcagcaaaagaggtgggatcgtagcgattcagcgtcgagtaaatgtaggttaccgttgccacgcagctttgccaccatgcgttttgagttcgccagttggcatcgtccgcgaggcaaaagacattgagtttttgtagcgccagcgcctctctttcaatccgcgtttcgggtagcggtgcgaggctgtctgtcaggtgactaatggcatcatcaagccgatcattaagcgcctgatgcatttgcgaaatggcacgactgggaaaccacagcacgccgattaacgtcatcagcaaggttggatagaggccaacaacgatacaccacagcgttaagcgcacgaccacttccggatagtcgagcatggcggggaaggtttgcccgtaaatagcgacaatggcgacggcgaaaaagaccagccccaagcgatgggtgcgcatcaaaaacatgcagcccatcaggatcggtccggcgatgatcaatcggatcaacggttcgccgtatgaccatttgtagatcaaaaacaggctgccgatctccagcaccgtggcaaccacaaacaagatcgcgacaaatttggtgtaaaacgcgttcgactgaataccgtaaaacagcactgccagcgataacgccacaaaagggatctcaaaggtcatcgagatcagaatcaccagcaggcagcctacccagagttgcacggtctgcggcacgcgacctggtcgccgctcgcttaactcttcatgaaagaacgccagcagcctgaccaccggtaatggcagggagttgagcgcgctcattattgcggctcaagattagcgactgccgaagcgccgatgcggaacatttccgggtcaggtttatcgaccatgattttgaccggaaaacgctgggcaacgcggacccagttaatagaacgagacactttcggcaggccgcccagcaccaggccgccgtcatccggtagcacgccgtagccaatcgaatccactttaccctcgaaggttttgccgctgtcactcatcaggcgaatcgttgcgggtgtacctgagcgaatatttttcagatcggtttcgcggaagttggcgatcacataccagtgacgagtgtcgattagggtaaaaatagggcgcatggcagaagcaaattgcccgacggaggttttgagggaaatgacccggccatcaaacggcgcgcgaacggtcgccatttccagatgcagtttggtcagggcaatatccgcttcgaccgccgcacgctgggcaactaatgcatccacgccgctgacggcgctggcggctgactgcgcctgtaacaatacggcattaagatccgcttctgcggcgcgctgcgccgttcttgcacggtcaacatcttccgctgagacaaaaccttctttcagtaatggctcggtgcggcgtaatgtatctgtggcctgtttcgcggcggcacgggctttttctaccgtggcattaaccgagtcggcaccaaactgttgcgcgtcaacgctacgctgggtgagcataatttgcttatccagcgccgcgagggaggcttcagctttcgccagattggcttcgtacgggcgcgggtcgatgcggaacagcaaatcgccctgtttgactgcctggttgtcggtgaccgccagttctacaatgcggccgctgacttccggtaccacatcaatggtatctgctgacgcgtaagcgtcattagttgatggcgcactgtctacgcgccagataacgaaaacaagggcaaccagcgccaacgcaaccactaacagagcagggaatttactgcgaggagcttttttcggcgtactttccatgagcgcgtctcaaatagattagaaaaatgccagccagaacagcatggcgtagagagcaaaaagggcggtataaataattccgacaaatgccagattgatatttgcccgctgaataactcgcctcgtgatgagcgtcaaaataaggctggcaatggcgcagaaaaaccagctgggataataagcgccgatcaccgggattgccggagataatgagcatcccgaaaccatgaagacgggaattatccaggctgtttttttgagttgcatcgccatgcgagagagaactgttggcatattaaatacatcctgtctgctgcgaacaatatctgtagtgaatatcaatatccattgaaggcgtcagtatggctattttcttgatgaataaaaatagctttattcagccaccgcattcataacttatatattttatttattaattggctgtatatatttttaaaataaatacttttgggggcttcagcgcccccaaaagcgagtgacattaatttggggttacgatattcacccacaaatcgaaattatccagacaggcgataatttcttccagtttcgcgccattgccaataattttggctttcttcgcttttaccagatccgccattttggcttgtccggtcagcacggcgtgcagatcttcacggctgatgtagaaagaggcgtcggcttgcggttgcagcgttttccggtagttaagcacgctatcgttcagcgtcaggttgaggttatcgccgttgctcatattgaagttcaggctgatatttttacccgcagctttcgcgctatcgaggcgaacggccataaagtcgaacagcatttcgaccgacatcccgcgaatggtgtccggggaaccggtggtgccgtggctgaacttatgcaccccttcgcgcagctctttcgcgccggtcaggtagaaaccgcgccatgtggcggactcggcctgatagcccagctgttcaaagttattcgcttgcagattcttcgcgacctggtcacccgggttggcggcaatcacctgtttcagcagttctgccgaccagcggtaatcaccttgcttgttcgcttcttgcgccaggttgatgacacgggcagaaccgcccagcgcctgcacgtaacgtttacccatctccacctgaccatacggatgcaggttagccgggttaccgtcgtaatagccaagatagaagttatacaccgcgcgggcgttgtggctgacagaaccgtaatagccgcggctggcccagttattggcaagtgcaggcggcagcttaatcatgtcgccgatttcattcatggtgtagccctggttcgccaggtgcagggtctggtcgtgaatgtacttgatggtatcgcggtatttaccaatataatcattgatatgcttattgccccagaccggccaggtgtgcggcataaacagcacttccgcgtcgttaccccacatatccagcgtttcgttcagatactcggtccacttgctggtgtcgcgggttttcgcgccgcgcagagtgtagaagttgtgcagggtatgcgtggcgttctcggcggtacacagggctttcagggccggaatatagaagtgcatttcggctggcgcttcgctacctggggtcatcaggaagtcaaactccaggccgtcgataatcatcttctcgccagttctgacgatagttttcgtcggtgcaataatgctcgggtcgcccgttgccagcgtcacgccaaggccattacccacattgccttgcgcgttgtgcggcagtaacagaccgtaagagtagagcgcacggcggctcatgatgttacccgccagcacgttttcgctgatggcttcgtccataaagcctgcaggggcaatcacctgaactttgccggatttaacatcggcttcagagataatgcctttcacgccaccatagtggtcggtgtggctgtgagtgtagataacggcaacaatcggtttttgcggacgatgctggaagtaaaggtcaagtgcggcttttgcggcaggcggcgtcaccagcgggtcgataacaataatgcctttctcgccctcaacgaacgtaatgttagagatatcctggccgcgcacctgatacattttatcggtgactttgaacaggccagaaataccgttgatttgcgactgacgccacaggctggggtttacggtttccggcgctgcggcattaatatcaaatttgtaatcgtccgcgcggtagtaaactttaccgttcgcatcacgcagaataccttcatccagcagcggggcgataaatccacgctgggcatcgtcaaaatcctgacgatcgctaaacggtaatgatttggcgtaattctgattaacctgttgggtatattgagtggcggctttcgcttcctctttcgcgttagcggtatttaccatcatgccgctggcggcagttaacgcaataacaatcctgctcaaacggaataaccgagagttattcatataaatctccatttatcatttatgtcgtaaatatgtaatccatgcaaaatacgtcatttaaagctggcgttatcataattgggaaattgcgactttaataagtggaagtgtgagcggaacgcgccattttattaggcatttgtgctgaagagggaaaattacagtaaaactatcattgcagaaaataatatgagtcgttttatgtgtttattatatatattgtacctgtcgttggcacagcgggacattgcgctactgtgccaacgttttactcatggggctttagggaaggtgcgaacaagtccctgatatgagatcatgtttgtcatctggagccatagaacagggttcatcatgagtcatcaacttaccttcgccgacagtgaattcagcagtaagcgccgtcagaccagaaaagagattttcttgtcccgcatggagcagattctgccatggcaaaacatggtggaagtcatcgagccgttttaccccaaggctggtaatggccggcgaccttatccgctggaaaccatgctacgcattcactgcatgcagcattggtacaacctgagcgatggcgcgatggaagatgctctgtacgaaatcgcctccatgcgtctgtttgcccggttatccctggatagcgccttgccggaccgcaccaccatcatgaatttccgccacctgctggagcagcatcaactggcccgccaattgttcaagaccatcaatcgctggctggccgaagcaggcgtcatgatgactcaaggcaccttggtcgatgccaccatcattgaggcacccagctcgaccaagaacaaagagcagcaacgcgatccggagatgcatcagaccaagaaaggcaatcagtggcactttggcatgaaggcccacattggtgtcgatgccaagagtggcctgacccacagcctggtcaccaccgcggccaacgagcatgacctcaatcagctgggtaatctgctgcatggagaggagcaatttgtctcagccgatgccggctaccaaggggcgccacagcgcgaggagctggccgaggtggatgtggactggctgatcgccgagcgccccggcaaggtaagaaccttgaaacagcatccacgcaagaacaaaacggccatcaacatcgaatacatgaaagccagcatccgggccagggtggagcacccatttcgcatcatcaagcgacagttcggcttcgtgaaagccagatacaaggggttgctgaaaaacgataaccaactggcgatgttattcacgctggccaacctgtttcgggcggaccaaatgatacgtcagtgggagagatctcactaaaaactggggataacgccttaaatggcgaagaaacggtctaaataggctgattcaaggcatttacgggagaaaaaatcggctcaaacatgaagaaatgaaatgactgagtcagccgagaagaatttccccgcttattcgcaccttccttagcacagaactgtggcaaaaaacgttgatgcgccaatattgctgcaccctgagcgccattaaagtcagaagatgaggcggcaataaagcgcacgacctgatgcggcagtggacggcgcaggtacttttgggtcatggcaacgagagtctcgcgtgggaaggcgggcatatccatcacgccaccgcccaggatcaccgcatcgggatcgaacagattaatgctggtggcaatggcccgtgccgcgttttcaagcagactctggacgaaaggggcgttttccgcatggacgaaaagatcgcgcaatgggtaatttcggggctgttgttcgtaccagcgtcttagcgccattccagagcaattggtttccaggcacccaggattgccacacgcgcagtgttgggtcatatctcccagggggatatgacccagttcgcctgccacaccgtgtgcacccgtccacggcgcaccgttcatccacactgcgaaccccatccccgtaccgagataggccgccagaaccagttgttgcgtaaggcggttttctactacgtcccaggagagttgcaggttaacgtcgcgggaaaactcaaccggacaattcagcgtattttcgagcttatcggcgagatcatataaatccgccgctgttaacggcaggttaggcgtagaaataatggtgcgtttatctttactgaccagcgccggaaatcccatcaccagaccatgacagcgagcgttaaagcgcctgagttgctcgtcaatcatttcgccgatacccgacaccaggccgggagcaatgacttctgcggtccgctttttttcgcagtgtagcgtttcaccttctgctgtccgcagacaaaagcggatatgcgttgcccccatatccacgcccgctacgacgttatgctgtttttgcatgaggctgtacctcgctttttgcagccagaatctgcgcggtcataattctccatgcttcgtcgatattttccgcatgattaaacaggccggaagtgccgacgataaagacatccgcccctgccgccatcagtttttcgtaagttgcctggttgcaggaaccgtccacctcaatttcgtactccagaccttctcgttcacgccatgccttcagttcggcaagtttatccagcatttcaggaatgaacggttgtccggcaaagccgggatcgacagtcatgaccgtaattttatcggccttatggatatagtatttcatggcctcaactggcgtctccgggttaaggatcagccccactttcatgtcatgacggcggatttcatcaatcaggcggaacgcctggccgttgatggtttccggatgcagagtgatgaaatctgctcccgcacgcgccagttgagcaatgtaatcctgcggccgcgtcaccatcagatgacagtcgagcggtttagttgccagttttttaacctgacttacgaagaacggtgagagtgtcagattggggacaaagtgaccgtccatgatatcgatgtggaagtaatcggcatggctgtcgataaattcgatctgttctttaaatttcagcagatccatacacattaacgagggggagattttcatgttcaattccttacttactgataagacggtcaagggcgacagccgcgataattaatccgcccatcaccaccagttggtaataggtttgtacctgcaaaatattcagaccgttgttgatggtgccgatgatcaacccgccaatcaccacagagaaaatgcgccccttgccgccgaagaaactggtgccgccaatgatggcgctggcaatggcataggtttcaaaacccataccggcaagcggttctgcggcaccgagtcgtgcagttgagacgacgcctgccagacctgcacaaacaccggagatgataaacaccaccaggatgtggaatttcacgtcaatcccggaatagaacgccgaatttttgttgccgcccagtgcgtagatgttgcgcccgagccgcatacgcgttgtcagaaaccaaaggatgagcgcgacaattagtgagaagataacggggacaggtatcccaattacgctggcggcaaagaagttcacgaagtcaaatgagaagccgtataccgagttggcatcggagatcaccagcgtgatcccacggaaaatcgcgttggtgccaagggtgatgatgaacgggtgtagccccgtccagttgaccaggcagccgttgatcgcccccagtgcgccgccaaccagtacaccgccaatcatcgctgcgagaaacgggtcaacacctgccaacatcagtttggcggtcaccataccggaaagcgccagaatcgcgccaaccgagaggtcgataccagcgaccaggatagcgaaaaactcgcccatgccgatcaataccgtcacggagctttgaacaaaaatctgggtaatattattggtggtcagaaaatattctggtgacagcgaaccaaagatggcgacgatgatcgccaggataaaaaaggtgccgtatttatcccagaacagcgcaaagttgaacggtttcttctcgctcgcttcgctttttactcttgtggtaaagcccatgccataatctcctcttcgctcatgtcatcgcgattcgtcaggatttgcgtcagtcgtccttcgcagaacacggcgatgcggtcgcagacggtgataatttcaggtagttcagatgacaccatcaggatgacttttccgtcgtccgccagttggcgcatcactttgtaaatttcggctttcgcgccaacgtcgatgccgcgggtaggttcatcgaaaataatcacttccgggcaacagcacagccatttggagatcaggactttctgctgatttcccccggagagttcggtgatattctggtttaccgaatgacatttcagcgccagcagttcgcgttgattttcagcggtacgttgctcgtcaacttcatgaaacaagcccatcgcgcctttatagccgccgtctttcagactgcggctgatcgccatgttctgagcgatggaaaagttggggaaaaaaccgttatcccggcggctttcagtgatgtaagccatcccttttttcacggcatccaggggtgaacgtggagagatatctttgccattaagacggatttctccgccagcgcgtttatccacgccaaacagacaattcatcagttcagtacgtccggaaccgaccagtccggcaaagcctaatatttctccccggcagacgctaaatgagatatcccggaccttttttctgtcacgactggtgacgttccgcacctcaaaaaccgtttcgtgcgcaaggttgctgacattctccttcatcgcgttaaaacggttttgcagttcgcggcctaccatcagacggacgatatcgtcatttgacacatcgcttactatgccgctgcaaacgctgctgccgtctttcatcaccgtatagcggtcgcaaatacggcgaatttccgccaacttatgcgagatatagacgatggccgtaccctctttacgcaactgattcatgatcagaaacagatagtccacctctttattggtgagtgaggaggtgggttcatccatgatgatgactttggcatcgagcatcagcgttttggcaatttctagcatctgcttgtggctgatagataaattcgccactttctcatctagatcaactttcaagcccacgcgtaataacatcatggcggcgcggacacgcatttctcgccagtcgataatattgacgccacagatttttttcgtcagatgacgaccaatatataaattttccagtacggttaattcatcaataacgctgagttcctgataaataatcccgataccgagttgtgccgctaatttatgatccagcttgttatagctaatgttattaatggtaatggtgcctttggtcggctcatgtattccggataaaactttcattagcgtggatttacccgcgccattttctcctagtaatgcatgtatttcaccaggataaaccgttaaattaaccgactttaatgcgtgaaccggaccaaaggacttgccgatccccgccatcgatatatatggcgtggccataaataacctctctgcacgaaatatcgtattattgcctgatggctacatttatcaggtctacgttcaggttattttgttggccggataagacacttcattagcatcatcatccggcatcattcagttttattgagtgaccaggattgaatcgaccagtttaaattccggtgctttatccagcgggataaccttgccggatttctcagcgtcaaccatcagcttcagacccgttgcgccgatatccgccgggttctgggcaaccgtcgcggtcatttgtccggcttccaccattttgcgggcttccggaatgccatctgtaccgacgaccagcacttttcccgtttttccggcgtttgcgactgcctgagcaacacccattgccatcgtgtcattcgcgcaatagatcgctttaatattcggattacgttgcaacacgttagtggcgacatccagtgctttaatgcggtcccagtcggcaggctggctggcgacaagcttgatctggcttgcttttttgaaggcttcggtggcaccattacgacgcgcttcaccggaggcgttaccggctttaccctcaatgattgcgacttcaccaccttcagcgcccaatttgtcaataatgaacgacgcgcctttcgccccgacagcaacgttatcggtggtgacaaaagcttccacattgccgccagcttttttcagattatccatgtcgattttttcatcgagattaaccagataaatgccttttttccatgcgcgggcgacaggcatgaccagattcactgaggataatggagcgaaggcgatacctttgtaatttttattactgagatcttcaaataactgcaattgagattgaaaatcgccttctgaaggagaggcaaaaatatcaacgctgacgcccagtgtttttgcttcatcttcaatgccttttttcatatctacccaaaatgggttggagagggttttcaatacgacagcatattcggcggcagcaaaagcgctggttgacaacattaagcccacgagtgtgccgctgaaatatttcagatatttattcataataatgttctcacggtaaggggacaggtaactccgcgatggcggaattacctttttcttatttcagcgcgcctggtgagaagaaatcaacaattgcgccggttttttgcatattaatattagcttgttcaatgttgagctgggcgacagagacaaaaaaagcgtccagcaaagttagttgtaatattcttgccgaggcattacgacctaataacggcgtttccggggctggtgagcaaataatataatcggccagtttcgctatcggtgaatggtagctatgggttatacaaataatctttgccccgttcttttttgccagttctacggccgcttttacatcactggttcgcccggaatgggtcactaccagcacaacatctccttcctgtaacaacgaagcggacatcatcatgatgtgagcatcaggataggcctgacagcgtacgccaatgcgcaagaacttgtgctgtacatcagcacagatagcatttgatcctccggcaccgtacaaatcccgctgtctggcctgatagaaaaagcgggcggcacggtggatctcatcaacgttgacgatcgactgaccttccataatggtgcgtaaagtgatgttaaataccttattcaccacatcctgcggcgcttcatcaaaagccaactcggaaggcaatacctgttctgactgagaaaaataatcttccagcgcactgcgtaagttacgaaagccgctaaaccccagcagctttgataccttaactatcatcgcttcagataccgccagagcttctgcgacatctttaattgcgggtgcacaactcaggttaccgggtttgagtaaccactccacgatgcggctttcattttctgtcattccttcctgcttcattcgcaggtaaggcgctaaccctataccgttcggaagcgctgaatcaaactctgactggctcatcacgttctcttgtccttgaattgaagacgccactatatcaccacagcaagaacagaaaagatgctggcgacttcacaaaaaaataaaatttataaagtttattttattgtgaacaatggcgagtggcttaaaattttatttcatttaattagtttaaaaacatgatgttatttgtttttctggttttttagatgatagatgttgctggatggtgagtgtctttaacgctattgcgctgtcagatgtaactctgtaaaacagatcaggaaggcgtaattcatcgattttgggtgtttttaattcattaacatcacaaatgttttttgattgtgaagttttgcacggacggggaagatgaatgaaaaagattgcatttggctgtgatcatgtcggtttcattttaaaacatgaaatagtggcacatttagttgagcgtggcgttgaagtgattgataaaggaacctggtcgtcagagcgtactgattatccacattacgccagtcaagtcgcactggctgttgctggcggagaggttgatggcgggattttgatttgtggtactggcgtcggtatttcgatagcggcgaacaagtttgccggaattcgcgcggtcgtctgtagcgaaccttattccgcgcaactttcgcggcagcataacgacaccaacgtgctggcttttggttcacgagtggttggcctcgaactggcaaaaatgattgtggatgcgtggctgggcgcacagtacgaaggcggtcgtcatcaacaacgcgtggaggcgattacggcaatagagcagcggagaaattgagattcatccactacttgcatggatgagtaatgattaatgtggatagagtttctttttgaggttggctaatgaaacgctttccgctatttcttttattcaccctgctcacgctgtccaccgttccggcccaggccgatattatcgacgacaccattggcaatattcagcaggcgattaatgacgcttataaccctgaccgtgggcgagactatgaagattcgcgcgacgacggctggcagcgtgaagtgagcgacgatcggcgcagacaatatgacgaccgccgccgccagtttgaagatcgccgcaggcagctggacgatcgccagcgccagcttgatcaggagcgtcggcaactggaggatgaagagcggagaatggaagatgagtatgggcgatgaggttgggtatggagcaggcatcgcccctcaccccaatggggagagggagaaaacgagcgcaatattcaatatcgagcacaatcggtcccctcgcccctctggggagagggttagggtgagggggccagcgcgcacattccctctcatcacgccaccccaatctccatcccatcaaaccccacctcaaaccctgacggtagtgcgttttccatcagccacgcatcaaactggtggctgatatgggtcagaatcacccgtggcgagcggataacctgattcagcgcaagcacggtatttaaatcacagtgattacgcggtgcatccgcgcgcggcgggtgactgcaatccatcaccattacctgcggctgattattgcgtaaaaatttcagcgttttttccggcaagcctgcggtgtcagacagccacgccacccggctgtgtgccgtttccagcagataaccgaaggtcagttttgagtggttgagcggcaggggcgtgacctgtaacccctgcaaatcaaacaccacaaacggttccaccgtgtggctgaaatcaagcaggcccggatgtttaaacagatcgtcgcagccctgttcatccggcgggccgtaaaccgggatcggatcgccaacgccccagcgcagcggaaacagcccctggacgtgatccatatgataatgcgtcagcaaaaactgctggaacgatccgggcgaccagcgatcggcgagatcgtgcagcccggcgtcgatcagggtgattgcgtcgttaaacttcactacgccgctgcacggttggcggcgatactgcggcgagcgccgcgctctggcgcaggccgcacactcgcagccccatgccggaacgccctgtgcgccgccggtgccggtgagcgtgagggtcaggctcatgttacagcgccttggtgaagcggaagtggctctgctcgtagccttcgcgcagatagaaacggtgcgcgtcgtggcgcttcacgttggtcgaaagttcggtcatttcggccccggcctggcgggcttcttcttctgcccacgccagtaacttactgccgacgttcagaccgcgcgcctgcggcattaccaccaactcctgaatttcgccgatccagttgacatgatgcagatgaaactgcaaatgcaggccgatcatgccgacaacttcgccatcaagcagcgccagatggtagcgcatgtttgggtcgcgcagattggcgttaaaacccacgcgaaacgcgtggtggtcaaactccgcctgttttagctcacaaatcagcgcgtaaaccgcgtcggtgtcgtactgcgtggccgggcgaagctcacaagcaggcatggtgtttctccttctgatggatcagcgtcagcagcgtgtcgaccgactggcgcaggctgccgtcattgttgagcgtatggcaatcctgtggagtatagcgggcggcgcgcgccaggcgggcgttaatttcactggcgttttcacggccacggttttccaggcgctggcggaggatctccggcgaaacctgtaaacagacgggcagcagcgccgattgatagcgcgcccgcgcctgcggcagatgggcgcgtgagccgttgaccagcacgtcgaatccggcgtgcagccagagatcaatctcgacgccgacgccataatacagaccgttagcgtgccagcttaaggccaacagattttgccccgcgcgggtaaaaaactcctgctcgctcagggcgatatggttttcacttccggcgctggcatcgcgcgtgatgtagcgatgcgccaccagtaactgagtttgttcccgcaggcggagttccgccagcaggctgtctttcccggagccggacggccccattaaccaaatcagttttcccatcatcagaacacccttttaccctgacgccagacgtggtcgatatgaatatgattgtccttgcgatgcgccagcaccaggtcggcgcgtttgccctcgccaatcaccccgcgatcctggagattaagcgcctgcgctggatttttagtcaccagcttcaccgcctgcggcagcgtaaagcggttgctctggtcatcggcgacgcgaaatgccgcatcgagcaggctggcggggtagtagtcggaagagaggatatccagcaggccaagctgcgccagttcactggccgccacgttgccggagtgcgagccgccgcgcacaatattcggcgcgcccatcagcacgttcatgccatgcttgcgcgaggcttccgccgcttcgaacgtggtgggaaattcggcgatcacgctgccaagctggtgagattcagcaacgtgggcgtgggtggcgtcatcgtggctggcaagcgcaatttttcgcgcgcggcacagggcggcgatggattcgcgattcggctgcgaccagcgtgcggcgagcgccagttgctcttcttcgtactgctgcatctgcgcatcagtgagggagtatttgccctgataatattcgcgatacttctcgcggttggcgaactggcgctggcccggcgagtggtccatcagcgacaccagcgtcaccggctcgcgctgcaccagtttttcaaacagcggcagcgtggtgtgatgcggcagttcgcagcgcagatgcagacggtgctcggcgcggttgacgccgcgtttctgcgtctcttcgatggcgttgatcatcttctccagattctccagccgatcgccgccgtcgcgcacgtcgccaattgccacggcatccagtacggtggtgatgccgctcgccaccatcagcgcgtcgtggctgctcatcgccgagtgggcaggccagtcaactttcgggcgcggggtgaagaatttatccagattatcggtatgcagctcaatcagccccggcagcagccagccgccttcgccgtccatcgcctccggcaggcggctctggctttcggcaaaggcgcggatttcgccgttctgcacctccagcgaaccgcttaccacctcgttttccagcaccagcttaacgttattgataatcatgaagaggctcccattgggtgcaggcggtcggcgacgtcattacgtacagcttcgtcatggaagatgcctacgatggctgcgccacgggttttggcttcgcgaatcagttccaccaccgcggcgctgtttttggcgtccagcgaggcggtaggttcgtcaagcagcagaatggggtagtcgacgataaagccgcgggcgatgttgacgcgctgctgttcgccaccggaaaatgtcgatggtgccaggtgccacaggcgttccggcacgttcaggcgggtgagaagacgcgcggctttagcggcgcaggcttcacgcggaacgccggtatcgagcagcggctgcatcaccacttccagtgctgagatacgcgggatgacgcgcagaaactggctcacccagccgacggtggttttgcggatttccaccactttgcgcgctggcgcggtgaccaggtctacccactcgtcaccgtgtttgatctggatttgaccttcgtcgggcagatagttggcgtacagcgagcgtagcagagttgatttgccgctgccggaatggccgtggagcaccacgcattcgcccgcgttgacggtgagcgaggcgcgattgaggacgggcaggcgcacgccgttttgctggtgcaggatgaaggttttactgacgttttgtacgttaatcatttttcgcctcgtggttcgggtgtcggatgcgacgctgacgcgtcttatccgacctacggggagcgcatttgtaggccggataaggcgtttacgccgcatccggcaccggctcaattctgcaaaaccgatgacaccagcagctgtgtatacggatgatgcgggtcgtcgagcacgcggtcggttaacccactctccaccacttgcccctgcttcatcaccagcaaacggtccgccagcaggcgggcgacgcctaaatcatgggtgacaatcaccaccgcgaggttcagctccaccaccaggccgcgcagcaggtcgagcaggcgggcctgcaccgacacatccagcccgccggtcggttcatccataaacaccagcttcggatgcgtcaccaggttgcgggcaatctgcaaacgctgctgcataccgccggaaaaggtggtcggcaggtcgtcgatccggttggcgggaatctccacctcttccagccacttctgcgcggtggcacgaatatcgccgtaatgacgtgccccggtcgccatcagccgctcgccgatattgccgcctgccgacacctggcggcgcaggccgtcgagtggatgctgatgcaccacgccccattcggtacgcagcaggcgacggcggtcggcctcgctcattgcatacagcgaacggttctcgtagtgaatttccccctgctgcggcgtcaggcgcgcggagatcgacttcagcagcgtggtcttcccggagccggattccccgacaatgcccagcacttcccccggccataaatcaaaagagacatcgctaaagcctttgcccggcgcgtaaaggtgggtcaggttattgaccgaaagtaacggttgattcattggttttttgcctcgctctgttggcggcaataatcggtatcggagcagacaaacatgcggtttccggcgtcatccagcaccacttcatcaagatagctgtgggtcgatccgcagatggcgcatggctcatcccactgctgaacggtgaacgggtgatcgtcgaaatcgagactttccacgcgggtaaacggcggcaccgcatagatgcgcttctcgcgccccgcgccgaacagttgcagggcgggcatcatgtccatttttgggttatcgaatttcgggatcggcgacgggtccatcacgtagcgcccatttaccttcaccggataggcgtaggtggtggcgatatgaccgaagcgggcgatatcttcatacagtttcacctgcatcacgccgtactcttccagcgcgtgcatggtgcgggtttccgtttcgcgcggctcgataaagcgcagcggctcggggattggcacctggaagataattatctgatcttcggtcagcggcgtttcggggatgcggtgacgcgtctggataaccgtcgcatcgtccgtacgttccgtggtgtttaccccggtcacgcgcttgaagaagttgcgaatcgacacggcgttggtggtgtcatccgcgccctggtcaatcaccttcagcacgtcgctttcgccaatcacgctggcggtaagctgaatgccgccggttccccagccgtacggcatcggcatctcgcgcccgccaaacggcacctgataaccggggatcgccaccgcttttaagatggcgcggcggatcatgcgtttggtctgctcgtcgaggtaggcaaagttgtagccgctcagattagccatggttctgctcctgttgcagacgtttgagtagctccagttcggcctggaaatcgacgtagtgggggagtttgaggtgtgagacaaagcctgcggcttcgacgttgtcggcatgtgccagcacgaactcttcatcctgcgccgggcctgtcgcgtgctcgccgtactccggggcttgcagagcgcggtcgaccagcgccatcgccatcgctttgcgctcgctcatgccgaacaccagcccgtagccgcgcgtgaagtgcggcggctcacccggcgggtcgataaaaccgttaaccatttcacactcagtcatcagcagttcgccgacgttcaccgcaaatcccagctcttccggcacaatcgacacgtcgatatagccgctgcggatctcgcctgcgaacgggtgattgcgcccgtaaccgcgttgggtggagtaggccagcgccagcaaatagccttcgtcgccgcgcatcaactgctgcaaacgggaggagcgtgagcaggggtaaaccggcggcgtgcgggtgatgtcatccggctgtgcgccgctatcctcttcaaacttcgccagcccctgacgcgccagcaggctgaaaacgtgcggcgacggctgctgttcgctgtcggcggtggtcagcgtcggcgcttcgccgtttgccagcagggtaaaatcgagcaggcgatgggtgtagtcgtaggttgggccaagcagctggccgccgggaatgtctttataaacggcggagatacggcgttcgagacgcatcccggtggtgtcgagcggctcgcttaccgccagcttcgccaacgtggtgcggtaggcgcgcagcaggaaaatcgcttcaacgttatcgccgctggcctgtttcagcgccagcgccgccagttcgcggtcggcaatgccgccttcggtcatcacgcgatctaccgcgaggttaagctgctgttcaatctgggcgacgctcagttcgggcaaatcggtatcgcctcggcgtcggctctcttgcagggcgtgggcggcgtcgatcgccttctcgccccctttcacggcaacgtacatcagcacacctccacatgagtggttcgcggaatagccagcaggcgctcgccacaggtcaggatcaggtcgatgccgagcgggaacggatgcgggcgctcggtgagttcgtgcagaatgcactccggcagctgcggagcgatcattcgttcttcggcaatacccgcaccagtaaggcgcaacatgcgtccgccgctcaggctggcgacctgtaaaatcagcgtcgcacccgcttccggcgcaacggcggtgccggtggaaagggcgttgagctgttcgctggaaatcgcctcatccgtcaccgcgaaggtcgcctgttccggctggctgaccagcggcgcgttggtatgaaaacgcaggctctggttgacgatatcgttatttaatggggtagaaagccacaccggcgtgtcgttatcggccagcgtcagcagcacgctggtggtggcgatattcagcggttgccagccgcgtttgagctgatgcagggcgacaatcacgcccggctcgctcatggcctttaacaggcgacgaaaactgtgctgggcatcctgcacgggaagcataaaagcggtttccagggtcatgcgttgtctccgcgaaccatcgtaaagaagtcgacccggctggcgttcacttcggcctggcgtgcggcaatgcgtgccatacggtcagcgtccagcggggcaataagggtttctgataagttttgaaagtggcgagattgctgcatcagcgcgtcaatcagcgcgcagcgttcggcgtgctgtttatcacgcccctgcacccagctgtagccgagcgtgccgtcagtcaggcgcacggcggcgcgggtcagcgtggcgtcgccggcaaaaaaacgttcgccggtgccgcccatccgcgcctgaatctgtaccaggccagtttcagcggcgcggatcacctcatagtcggcggtgatgtttagcgcgttcaggcgtgctgccagttcagccggttggctgtgcgccagcacggacatccagtgctggcgggtcgcggtatctgcgtgcattcagtgctccatagtgaattcaatcatgtcggcgcgcgtcaggctgacggagtactccgccgggctgctttcaccgtcacggtggttaagggtgcgcacgcacagcagcggcgacatattcgggatttcaagacgctggcactctttggcctgggcgcggcgggcgctgatccgcgtctggctgcggcgcagcgcaattccggtttgctcgcgcagaaaatcgtgcagcgagccgctgtcgaagcgttgcagcgtcggccagagggtgaggtccgcgaagtagtggtcgattaaacagagcgcgacgccgttgacacgacgcagggtgcgcaggtggatgacgttctccccctcggtaatccccagtgcgtcagcgacgtggccggacgcggggcgcaataccgaaagcagtttttcgctggtgggatggctgccctgatccagcagattctggctaaaacgcgcctgggcgttgagcgggtaatcgaacgggcgcatcagcaccagcacgccgacgccctgacggcgctgtacccagcctttttccaccagttggtcgatggcgcggcgcagggtgtggcgattcacctcaaagcgcgctgccagttgctgctcggcgggaagatagtcgccgcagcggtagtgttgacgaagctcctgctcaagttttgcggctatctcttgatagcgtgttgggtagctggtcggatgtgtagacaagtgcatagatatcaatgcctcgcttatcagataaagtgcttacgcaaccgttgagagaggaaatccagcaggctgaccgtgacgatgataagcaccatcagggcgcaggtttgttggaactggaaaccgcgaatcgcttcccacagggtgacgccgatcccgcctgcgccgaccatgccgacgacggtcgccgagcggacgttggattcgaagcgatagagggagtaggagatcagcagtggcatcacctgtggcagcacgccgtagaggatctcttcgagcttgttggcaccggtggcgcgaatgccttccaccgggccgggctcaatcgcttccaccgcttcggaaagcagcttggagagcacgccggtggtgtggataaacagcgccagcacgccagcacgccagcgaacgggccgaggccgacggcgaccacgaacagcatggcgaagaccatttcgttaatggcgcggcaggcgtccatcaggcggcgaacgggctggtaaacccaccacggcaccaggttttcggcgctcatcaggccaaaggggatggagagaaccaccgccagcgcggtgccccagacggcgatttgcagcgtgacggccatttcggtgaggtaatcctgccactggctgaaatcgggcgggaagaagtcggcggcgaacgtcgccatgttgccgccgtctttgatcagcgtaagcggggccatttccgcgccctgccacgagacgaccaacacggcgagtacaacggcccagctcagaagcgagaaccagctgcgcttgggtggggcgatggtgatggtttgcatgtttggctccggtctgtaggccggataaggtgcttgcaccgcatccggcatcaacgcctgcacattgtcggatgcgacgccggggcgtcttatccgacctacgatttactgcaccgctttactcaccgaactcatcgcgcttagcgcgttgttcaggcggtccaggtcatccagctgcgcctgaatctcggtggtttttgccagcttgtcctgctcattcagtcctttattgcttttcacgccctgcatctctttaaacagcgcgagctggcgaatcggcaccagttgcaggtcgctggaagcgcggaatggcgcccagcccaggcgttccagcaccgctttttcttccggcgttttgccgtagttcataaagaagtcgtagatcttgtctttggtggtttcggaaagattcttgcgccagacgatcggatcgcctgggatcagcggcgacttccagatcaccttcagttctttcagcttctctggcgcggaggttttcagcttgtcgaggttttcggtgttgttggtggcaacatccacctgcttgttggcgacggccagcgcgttggtttcatgcccggcgttgacggtgcgcttgaagtcgctggcggagatattgtttttggcgaagacgtagtagccggggacgaggaagccagaggtggagttaggatcgccattgccaaaggtgagatctttccgcttcgccagcagatcgttcaggttgttgatcggactgtctttgttgacgatcaacacgctccagtaacccggcgatccatccgccgcgaccgtctgggcgaagacctggccattggcgcgatccaccgcttccatcgccgacagattgccgtaccaggcgatatccactttattgaagcgcatcccctggataatgcccgcgtagtccggggcaaagaaggcgttgaccttcacgcccagcttcttctccatatcctgcaagaacggcgtccattgcggtttcaggttttgctgtgattccgttgaaataatgccgaaattcaacgccttttcctgctcttcggcgtgcgccgggcttaacagggtgctgaggctgaacatgctggtgaaggccagcgaggcaattatcttagcgttcattcgttttcctcaatgatggggatgtcaggcagctttcgcgttctcttcgacgcggttaatgctgcggtagagatggtcaaaacgttcgttatcaaactgttggctgctgccgtcgtagaagacgtgcccctggcgcagggcgacgatgcgttcgcagtagcgcagggcgtaatccacctgatgcagcgtgacgaccacggtgatgccgtcgttctggttgatgtcgcgcagggtgtccatcacgatgcgcgctgattctgggtccagcgaggcgatgggttcatcggccagaatcactttcgcctgctgcatcagcgcacgggcaatcgccacacgttgctgctggccgccggagagggtggaaacgcgctgatgggcaaaatgcaccatgccaacgcgggtcagcgcctgtaacgcgcgctgtttctgctcgccggtgaaccagctaaaacaggtgcgccagaacggcgtgctgccgagcgcgccaatcagcacgttctccagtacgctcaggcggttcaccaggttgaattgttggaatatgtagccggtatgggcgcggcttttgcggatatcgcgggccaggcggccttcgcgctggactgtgcggcccagcagctcgatatggctaccgacagatttatcgccggtaatcaaaccgcttaagtgacgtaaaagggtggattttccggaacccgacggcccaagcagagccaccatttcaccgtgatgaatgttcagatcaaccgcatgcagcgcctgatgctgattgaaggttttggcgagcttctcgacacggataatcgtttgcatgatgcagcctccctaaaaaagtggctccatcgtggcggattattgtgacgatttggttaattaaaagtgactaacagatgaagagttaacgggaattcgatgacagtgcgggagggcgggcctcccggcgggttattgcgttggttgttgtttgacgacattaatcatccacggtacgccaaatttatcggtgactttgccaaagccatgcgcccagaaagtttcctgccaggccatttcgatttttccgttagcggcaagattgtcaaaccagcgttttccttcttcgacctgttgcgaatcgagcaccagcgtaaagccggagtagctggcttttcctgacggcatggcatcgctcatcatgatgtcgcttccggcaatgcgcacattggcgtgggcgatggcggtatcgggaaattgcattccggaagggcagttctcggcgctgtcctgcgctgattttggcatttcgccgaagctgattttatagagcagttccgcgcccaacgtacgttgataataggcaatcgcgtcggaacagttaccggcaaaagagaggtagggacttaacggcatgatggtgacctcagttaagagaagccagttaagtgtagttcgaaatttatacagatgagaggcggcctgataagacgcgcgagcgtcgcatcaggcagtcggcactgttgccggatgcggcgtaaacgccttatccggcctacggagggtgcgggaatttgtaggcctgataagacgcgcaagcgtcgcatcaggcagtcggcaccattgccggatgcggcgtaaacgccttatccggcctacggagggtgcgggaatttgtaggcctgataagacgcgcaagcgtcgcatcaggcagtcggcaccgttgccggatgcggcgtaaacgccttatccggcctacggatggtgcgggaatttgtaggcctgataagacgcgcaagcgtcgcatcaggcagttggcactgttgccggatgcggcgtaaacgccttatccggcctacggagggtgcgggaatttgtaggcctgataagacgcgcaagcgtcgcatcaggcagtcggcaccgttgccggatgcggcgtaaacgccttatccggcctacggagggtgcgggaatttgtaggcctgataagacgcgcaagcgtcgcatcaggcatctggcaccgttgccggatgcggcgcgagcgccttatccggcttaccgatcacaatacaatcagttctttttcacaaactcagatttcagtttcatcggaccaaaaccgtcgattttgcaatcgatgttatggtcgccttcaaccaggcggatgtttttcactttggtgccaattttcagcatcgaagagctacctttcaccttcagatctttaatgatggtaacgctgtcgccgtcagccagcagattgccgttagcatctttaacgatcagctcgtcgctttcctgtgcaggttctgcgtcgttccattcgtaggcacattccgggcagatgtacatgccgttatcttcgtaggtgtattcggagttgcattttgggcagtgtggtaatgacatgtggatttcctcaaaagtcagcagggcaaaagcgccaaaaaacggcagattgccgaaaaaggccgcaattatacacaaaatccctgagtttgtcgggggtactgctgattttagacgacgatcgttttcatttgaaaggaaacgcaaaaagaaaataatctttttgcctctatttattatttaagataatgttaatgctctacttgttctttttttaattcacatgatatttttatctttctgacgttttaaacgtatcagaagacgttatttattctgataaaaaacaacacactaaatataaaattatttcttgcagtaattataaaagccgaaaacagaactcaaaaacaatctggctaaataaaataacaaaatttgctttaaggaagaattttctatgtacacacagaccctgtatgagttaagtcaggaggctgaacgcctgttacagctttctcgccaacagttgcagttactggaaaaaatgcctctctctgtacccggagacgacgcgccacaactggctttaccctggagtcagcctaatatcgccgaacgtcacgcgatgctgaataatgagttgcgtaaaatttcccgactggaaatggtgcttgcaattgtcggtaccatgaaagcagggaaatcaaccaccattaatgccattgttggtacggaggttctgcctaatcgtaatcgcccaatgactgcgctgccgacgcttattcgccatacgcccgggcaaaaggaaccggtactgcatttttcacatgtcgcgccaatcgattgtttaattcaacaattacaacagcgcctgcgtgattgcgatattaagcatctgaccgatgtgctggaaatagataaagatatgcgtgcgcttatgcagcggatcgaaaatggcgtcgctttcgaaaaatattatctgggtgcccagcctatttttcattgtctgaaaagtttgaatgatttagtgcgactggcgaaggcgctggacgtcgattttcctttttctgcttacgccgccattgagcatattcccgtgattgaagtggagtttgtccatctagcggggctggagagttatcccggtcagttgacgttactggatacccccgggccaaatgaagccgggcaaccgcatctgcaaaaaatgcttaaccagcagctggcacgcgcctcggcggtactggcggtgctggattatacgcaactgaaatcgatctccgatgaagaggtccgtgaggcgattttggcggtggggcaatcggtgccgctgtacgtgctggtcaataagttcgatcaacaggatcgtaacagtgacgacgccgaccaggtgcgggcactgatttccgggacgctgatgaaaggctgtattacgccacagcagatatttccggtgtcgtcgatgtggggctacctggcgaatcgggcgcgctatgagttagccaacaacggtaagttaccaccgccagagcaacaacgctgggtggaagattttgcccatgccgcgcttggcaggcgctggcgtcatgccgatctggcggacctcgaacatattcgtcatgctgccgatcagttgtgggaagattcgctgttcgcccagccaattcaggcgttgcttcatgccgcttacgctaacgcctcgttgtatgctctgcgatctgccgcgcataaactgttgaattacgcgcagcaggcgcgggaatacctggattttcgtgcgcacgggttaaacgtcgcttgtgaacaattgcggcaaaatatccaccagatcgaagaaagtttgcagctattgcaactcaatcaggcgcaggtgagcggcgagattaaacatgaaatcgagctggccctgacctccgccaaccactttctgcgtcaacagcaagatgcgctgaaggtgcagttagccgccttgtttcaggatgattcggagccgttaagcgagattcgtacccgctgtgagacactgttacagacggcgcagaacaccatcagtcgcgactttacgctgcgttttgccgagcttgaatccaccctttgccgggtgttaaccgatgttattcgccccattgagcaacaagtcaaaatggaattgagcgagtcagggtttcgtcctgggtttcattttcctgtttttcacggcgtagttccccacttcaacactcgccagctgttcagtgaagtcatttcgcgccaggaagcaacggacgagcagagcacgcgtttaggcgttgtgcgtgagactttttcgcgctggttgaatcagcccgactggggacggggaaatgagaaatcaccgacagaaacggttgattacagtgtgttgcaacgagcattaagcgcagaagtcgatctctattgccaacaaatggctaaagttctggcagagcaggtcgatgaatctgttacggcaggcatgaatacttttttcgctgagttcgcttcatgtttgacggaattacagacgcgtttacgcgaaagtctggctctgcgtcaacaaaatgaatcggtggtcaggctgatgcagcagcaattgcagcagactgtgatgactcacggctggatttacaccgacgcccagctgttacgcgatgatattcaaacacttttcacggcagaacgatattgaccaagacgttacttgacggccccggtcgcgtgctggagtcggtttatccccgctttttagtggatctggcgcagggtgatgatgcccgccttccacaagcccatcagcagcagtttcgtgaacgactgatgcaggaacttctttcgcgtgtgcagcttcagacatggacgaacggcggcatgttaaatgcgccgcttagcctgcgtctgacattggtggaaaaactggcgtcgatgctggatcccggtcatctggcactgacgcagatcgcgcagcatctggcgctgctgcaaaaaatggatcaccgccagcactctgctttcccggagctcccccagcaaattgccgccttgtatgagtggttttcagcccgttgtcgctggaaggaaaaggcgttaacgcaacgaggcctactggtgcaggcaggtgatcagagcgagcaaatttttacccgctggcgtgctggggcgtataacgcctggtcgttgcctgggcgctgttttatcgttctggaggagttgcgctggggggcatttggcgatgcctgccgtctgggaagcccgcaagcggtggcgttgttgctgggtgatttgctcgagaaagcgacacaacatctggcagagagtatcaatgcggcaccgaccacgcgtcactattaccatcagtggtttgcctcttcgaccgttccgacgggcggggagcatgctgattttttaagttggctgggaaagtggaccacggcagataaacaacccgtttgctggtcagtgacccaacgctggcaaactgtcgcgctggggatgccacgactctgttcagcgcagcgtctggcgggggcaatgctcgaggaaatcttctctgtaaatttggcgtaaataatcagttacatcaatgagtcctaaacgaaatccatgtgtgaagttgatcacaaatttaaacactggtagggtaaaaaggtcattaactgcccaattcaggcgtcaactggtttgattgtacattccttaaccggagggtgtaagcaaacccgctacgcttgttacagagattgcatcctgcaattcccgctccccttttgcggccgtcgcgctgatttttctggcgtttgcggaaatgggccaactctgcgaggaaagctatgctgaaaaggaaaaaagtaaaaccgattacccttcgtgatgtcaccattattgatgacggtaaactgcgtaaagccattaccgcagcatcactgggtaatgcaatggaatggttcgattttggtgtttatggttttgttgcttacgcattaggtaaagtttttttcccgggggctgaccccagcgtgcagatggttgctgcacttgccactttctccgttccctttctgattcgaccgcttggcggactcttctttggtatgttgggcgataaatatggtcgccagaagatcctcgctatcactattgtgattatgtcgatcagtacgttctgtattggcttaataccgtcctacgacacgattggtatttgggcaccgattctgctgttgatctgtaagatggcacaaggtttctcggtcggcggtgaatataccggggcgtcgatatttgttgcggaatactcccctgaccgtaaacgtggctttatgggcagctggctggacttcggttctattgccgggtttgtgctgggtgcgggcgtggtggtgttaatttcgaccattgtcggcgaagcgaacttcctcgattggggctggcgtattccgttctttatcgctctgccgttagggattatcgggctttacctgcgccatgcgctggaagagactccggcgttccagcagcatgtcgataaactggaacagggcgaccgtgaaggtttgcaggatggcccgaaagtctcgtttaaagagattgccactaaatactggcgcagcctgttgacatgtattggtctggtaattgccaccaacgtgacttactacatgttgctgacctatatgccgagttatttgtcgcataacctgcattactccgaagaccacggggtgctgattattatcgccattatgatcggtatgctgtttgtccagccggtgatgggcttgctgagtgaccgttttggccgtcgtccgtttgtgctacttggtagtgttgccctgtttgtgttggcgatcccggcgtttattctgattaacagtaacgtcatcggcctgatttttgccgggttactgatgctggcggtgatccttaactgctttacgggcgttatggcttctaccttgccagcgatgttcccgacgcatatccgttacagcgcgctggcggcggcatttaatatttcggtgctggttgccggtctgacgccaacgctggcggcctggctggtcgaaagctcgcagaatctgatgatgcctgcctattacctgatggtagtggcggtggttggtttaatcaccggcgtaaccatgaaagagacggcaaatcgtccgttgaaaggtgcgacaccggcggcgtcagatatacaggaagcgaaggaaattctcgtcgagcattacgataatatcgagcagaaaatcgatgatattgaccacgagattgccgatttgcaggcgaaacgtacccgcctggtgcagcaacatccgcgaattgatgaataagctgaaacggatggcctgatgtgacgctgtcttatcaggccaattgaactcttaaggttcacttaatctctgacgcgcatactctcctccaggttaacggaggagagtgcaatgaaaaaccgtgtttatgaaagtttaactaccgtgttcagcgtgctggtggtcagcagctttctttatatctggtttgccacgtactgatctttcttcagccgtacccaggcccgcgtgccggaagtctcttgccggttttgcaggaaaaactgcccgtgatgcaactgtgtaatgcggctgacaatacttaaccccagaccaatcccgccataacggctgtccatacgtacaaacgctttactcaactccccgcatttactctcatcaatacctggtccttcatcttcaactgccatgaccgctccgtcatcttcttgcagcttaatcataatgttgctgccttgcgggctgtaacgatgggcgttttctaccaggtttcgcaataacatccgcagcagggttgcatcaccctgaacggtgatgtcggcggcgctctctggcaatagcagggtttgctgtcgctggtcgagcatggtactgagttcgtcatacgaggggagaatgacatcttccagcagttttacatgttgataattaccggaagaaaatgactgtccggcacgcgccagttgcagcagctgggagacgctctccatcatctgatcaagccgtgccactaacggtgctacatcaatgtgatgcgttttcgccagcagttccagatgcaaacgcacccccgccagtggcgttcgcagttcgtgcgcgacgtcagcggtaaacaacctttcgttatccagcgtgctggtcaggcgactgaccagatcgtttaacgccgaaaccaccgcttcgatttcgagggtggcgctgtgaatggcaatgggcgttaagttgtcggcggtgcgcgcttccagctctttttgcagctccgccagcgggcgggtgatgcggcgtaccgcctgatagcagataaatagcgtcaggctgaccataaagacgccggggacaatcaggctggcgaccgcctcgcggatctcacgcatgatgtggcgatcgttgttgcgattgtcgcgtagcgcctgctcaaacagctgaatctgctcggtactttcatgccatagccagaagacgctgatcagctcaaacaccaacaaaatggccccgatggtcaatatcagccgttggcgcagcgatattggtcggcgcagaaaatgcatcagattcaattagttttcctcattcgcgaccagcatatagccaaagccgcgcacggtgcggatacgggctttgcccactttgtcgcgcagattgtggatatgcacttccagggtgttggtcgagggttcattgtcccagttatagatgtcgttgtagagaatttcccgatgcaccggactgcctgctttgagcattaaccgtgacagcagagcatattctttgggcgtcagaatcaactcttcaccgcccatccatacctgacggcgacccatgttcagcgtcagattgccaacaatcagctcactttcgccctgattattatggcgtcgtagcagggcgcggatacgggcatgtaactcttccagcgcaaaaggcttcaccagatagtcgtcggcaccgacatccagcccggcgattttgtcggtcagcgtatcgcgagcggtgaggatcagtaccggcagggtatattttttctgccggatacgggcgagaaaatgcagtccatcttcgtcgggtaaccctaaatccagtaccaccaggctgtaatgacctgcctcaaggctttgttccgccatccgcgcggttgtcacgctatcgcacgcgtagccttcggtttgcgccgccagaatcagtccctgcaataacagcgtatcgtcttcaacaatcagaattttcattcactcactctcctgcaagtttgcagaatatcatccgcagcctggtaatacttcgtctcaacgccagttaatcccaatagcgtggagaataaattgtcttgtgaatagtgttgcgtttgcgcctgtttttgcaggcagttctggtcaacctgataccgtttttgataatcctccgacagccacagcagcatcggcacctgtttttggctatccggggcgatggcataaggcagaccgtgcagatagatgccattttcacctaacgattcaccgtggtcagaaagataaaccaggctggtggtaaatttatcctgatgttctttcagcagattaatcgctttatcaacaatatagtcgacgtaaaccagcgtgttgtcgtaagtgttcaccagttgctctttggtacaggtctggatctcattggtgtcgcaggttggggtaaatttcctgaactgaggcggatagcggttgtaataggtcggaccgtggctgccgatggtgtgtaagacaatcacgccatcaccttgcaggttattgatgtactcttcaagcccgtggaacagcacttcgtcatagcattcgccgttgatgcactgatcaggtagattcagcgcggtgacgttctggtgaggcacgcggtcgcaggcacctttacagccgccatcgttgtcattccacagcacgttgatgcccgctcgctgaatgatatccagcacgccttcctggtgctgtgccagctcttctttgtagtgctcacgcggcatatccgagaacatgcacggtactgaaactgccgttgccgtgccgcaagatgcggtattagggaaatagaccacgttatctttcgccagccgcgggttagtttcacgcgggtagccgttgagggagaagttctccgcccgcgaggtttcgccgacaatcaggatggtcaaatttttacgtttttcgttctgcattaacgggttgcggtgcgcgtcttcaccaattcgcaccagcggcagatttgccagtcgctgatgggagtaccatgaccagctggcaacaatgctgttagaggggcttaaggatttcaccagctctttgttattgcggaacaacgaggcgtagtctttataaaacagtgcggcgaccagcaaaatcagtagtacagaaaccagaatattggctccacggaaaagaacactgcgcagacgcgaggtggcaggtttgatttttatccagcaggcaatcagcgcagcaagcacgccgctgaatcccagcgttaataacatttgcggtgtcatcagcgcataactttctgccggagtggtatcaataatattggcaatcatcgagcggtcgatgacgatgccgtaagtcattatgaaatattgtgcagccgcgccaaccagaataaacaggcaggccagtggtcgattaagccataagaaagagcttagtgtcaggacaatattaatcacgctgaaagcgacgaccggcatcgacaagaaaaccagtacgttatgcagcgaatccagcggcagcgcctgcaacacctgtttaaaaaaggcaatattcaggcagatagagatataaaaagcggccaacaatagccaggcgagtaaattcaaagagggtctttttagtaggcgcttcaacatcacggtgtttccatcgaacaaagtgcgcatatgctcgcaaagcaaaattaagccaaccttaagttcttaaggttggcttttatgtttgctggattaaggggaattaatctttgcttattggtgcatctaagggatacgggtttttatgtagccggttgtaattcagcgcatacatggcggtgatgaccatcagggtgacaaatgaccacataacctctttcgctccggaccccaccacggcccagatgcagtagaggaaggcaatggtagtaactgccagatatgccgggcgtgctttaccaaagtgaccgtgtccgagcagcagtaacgccgcacaggtgtaaagatatggcaccagtgtaaagatgaccgagacggaagaaaccagaccgaactctttggtcgcgtttggtgaaatgctgctgagctggaagatggtcatcaaaataccgacgataatcagccccgccactggcgtacccgctttatttacacgggcaaaaatcggtgggaacagtccgtcatcggcagcggctttcgccgtttgacccgccagcaacgtccagccgcccagtgaacctaagcaacccgcagctgcgcagaaggaaacaatggccccggcggtgtcacccaacgccatccgtgcggcatcaccgaatggcgaagcagaaacgcgcagtgcggcattagggatcatccccataatcgcggtggtagaaagtacatagcaaacggcggcaatcaataccccaccaatggtggcgatagggacattgcgtttcgggtttttcaccacacctgcggcaacggaggcactttccacaccgatgaacgaccacagcgtaacgttaagggtactttgaattgcaccgaaggtgcccaggccgctgacgttccatgccgccatataggtttcaccacggaaccagaaccagccaaatacggcaatcccgacgatggggatcagcgccagcacggtggcaactgcctgcacacgggtgatcattttcggaccgacaatgttcagcaggacgaagatccacagcaccacgacgcaggtgatggttaataccaatggatctttcagaatcgggaagaagtaacttaaatatcctacgccaatgaccaccatggcgatattgccgatccagcaggccagccagtagaggacgttggtttgataaccgagaaacgggccaaagcagcggcgggcgtaagcgtaagaaccaccaggacttgggtcgaggaacgacattttggcgtataccatcgagagccccagtgcaccgataatcgtcaccaaccatccataaatggcaatcccgccagtagaggccaggtttgcaggtaacagaaaaacacctgaccccataatattccccgacaccatcagggtgacggggattaagcccactttgtgagcatcagcatccgaagacataattaaactcctgcgaaggcgagcttcgtgacaataaattacgtcatatcatacgcctgcattcgatagttgaattattatcgaccgggttatcgctgatgccgttattaatatagctcttcgttaaggttaaaaatcaggcgacagtgcgttctctgtgctgactaacataatgcagcggcgtcataccgtagaagtctttaaagacagaaataaagtacgacgtactgttgtagccgcaggactgtgatacctgagagatatttttaccgtccatcattaattcatttacggcataacgcatgcggcaggtggtgattatttggctataactggtgttttcgcttttcaactttttctttaacagacttgggctaagacataaacaactggctaccatactaagattccagtctttgtgaatatcgctttcaataatttgataaacgctgtcacttacacaattacgtaacatatacatcattaatgaaacgaattttttactgtcgagaaaacgggatagcaccgtgaataataatgcgcgtgttcgttccttttctgactcagtttctgcgggcatcatgctgtgttgcgcggcaacgcgaaagacgtctggcgtcaggcatggcagggtgagtatgggcgtagcgctacgttgccatactggtatttgcgagagatctttattcagaaaccggaggtaatctttgatgatgtcgtgactaatatgagcaaccaaagtgttgttaagagaggagacgtcgataatattattttcacaatttaataacgccatatggttagctttaaggctaataggttctttcccattcacccttatccagacatctttttcagtcaataaaacaatacaaggttggtcgctgcaaatcctcatacatgtactcctgagtgcgaataaaagaccagttctcgctaaagcaaagcgataccgggaaatggttatataattgtatgatgaatataaacatgcataaaaataacgagttttactaatagtacaaatttttatagtaatttctcatgtacatatttttttacaggataaataacaggcaaaaaaaagcgcggggtggggccgcgcaaaaagtatgacatttttgtttgcagcaatttttatgaaaacgttgccatactcaaaaggcctaaggccaggcggcgtaatgttatttaaacaattacgccttcagcggaatagtggttacgctttcacgcacataacgtggtaaataccgtcaataatttcagtcccttcagtttcgtgttcaaatccagggaaatggtggtcccaggattgcagcgagcgtaaataacttacttgcggactgtttttatcgccgaagttttcaccagacagcagcatcgggattcctggcggatacgggataactgagtttgccgcgatgcgtcctggcagattttcaatggataccagttcgacattgttgtcgacaatcgcgttgtacgcttcacgcggggtgacttccgccaccggcaggccggaataggcttcgttcaaccgtgcgccagggttgttttctttcagccaggcaaacatggtgtcacccagatcgtgaatccccatgttcgcgtaagtgtcaggatattgttcaacaagttccggcatcacctgcgccagcggtgtgttggcgtcatagtggcgtttgaaggagcaaagggtgttaaccagagttccccatttcccacgggttacgcccatagagaacaggaacataatttggaagtcagtggtgcgggtaggtacaatgccgtggcgaccaagccaggcagtgaccagcgccgccggaacaccggtttcttccagttcaccatcttcacccattcccggagcaaggatgctgactttaatcgggtcgagcatactccagttatccggaatatctttgaagccgtgccagctttcgcccggatgcattacccagcagtcctgaacggtggtcagcagtttggttggtgcgtcagcaaagtcataggttttgccggtttgtgggtcggtgacgacttctttgttccacggtttgaagaaccagctaccgtcagcggtgaactctttatatagccgcgccatcgcctgacggaaatcaaccgcttcgtcaatcacttcctgtgtcagtgacaggccgctgttgccgtccatcatcgacaccgccacgtcgttggatgcgcagatggcatacagcggggaggtggtggcatgcatcatgtaggcctggttgaagcgggagaagttaatcgccccacgaccttcacgtacatgaatataagaagcctgtgacagcgcattcagcagtttgtgggtggagtgggtggcgaaaacggtaggaccgttgtgatcgccaggttcgccgcgcatggcatagtgatcggcatagatcgggttgaaacgtgcatagccgtaccaggcttcgtcaaagtgcagacgatcggaggttttttccagcagatcctgcgcttctttagcgttataacacacgccgtcataggtgcagttggtcaccacgcagtaagacggtttttgcccggctttgtctttggtcagcgggctttcactgattttcttctgcaaggtttcaggttgcatttcctgcggatagattggcccgataatgccgtagcggttgcggcttggcaccatatagaccggtttcgcgcctgtcagcatcaaaccttgttcgatggatttatggcagttacggtcaacgaccacgacatcgttatcggtcatgcaagcctgcatgatggtgcggttagagccggaagtaccgacgactaccgaccaggagcgatcggcaccaaatacgcgtgcggcatatttttcgctttcgccaaatgcgccagtatggtcaagcaaagaaccgagggaagttcgttcgatgcccatgtcggtgcggaacagattttcaccatagtagtcatggtagaaacgtccggcgggtgttttggtaaaaccaacgccgccctggtggcctggcgctgcccaggaatattcatggatgtcactatatttcatcagcgcgctgaacagtggcggcaacagctgctggcggtagcgggtcatcgcggcaacggcgcgtccggcgataaagtcggcggtatcttccagaatccaggcgaattcatcgacaagctccagcaggtcgcgatccattgcggcgagggctttttcccgatcgcccaacaggaagaccggcacgttttgttggcgctcatgaagcttaccgatcaattgtctgacgttttgatgttcgtccggatgttccatttgatagctgaacatcaggcagtcaatggcttcgtttgaagagagaatggcaaaaccatcatcaaaggaggtggatttaatcacggtaacattttgctggcttaaagcatctgccagacgctcaacggcgttaccgacccaggtgtcttgatggagaaactcgctttcaacaattaatactttcatcattgcttacccggttatgaaggaatcttcgttgcgggcaagtatcttccggccttttcgggctgtaaagcgcgtgaaaaacaaacatttttgaaatatttagttttataaacaatacgttatgtgattattttaaattattttcactgcttattatcgacggctaaactatttttttggctgatactgatatcgtctttagccgggaaacgtctggcggcgctgttggctaagtttgcggtattgttgcggcgacatgccgacatatttgccgaacgtgctgtaaaaacgactacttgaacgaaagcctgccgtcagggcaatatcgagaatacttttatcggtatcgctcagtaacgcgcgaacgtggttgatgcgcatcgcggtaatgtactgtttcatcgtcaattgcatgacccgctggaatatccccattgcatagttggcgttaagtttgacgtgctcagccacatcgttgatggtcagcgcctgatcatagttttcggcaataaagcccagcatctggctaacataaaattgcgcatggcgcgagacgctgtttttgtgtgtgcgcgaggttttattgaccagaatcggttcccagccagagaggctaaatcgcttgagcatcaggccaatttcatcaatggcgagctggcgaatttgctcgttcggactgtttaattcctgctgccagcggcgcacttcaaacgggctaagttgctgtgtggccagtgatttgatcaccatgccgtgagtgacgtggttaatcaggtctttatccagcggccaggagagaaacagatgcatcggcagattaaaaatcgccatgctctgacaggttccggtatctgttagttggtgcggtgtacaggcccagaacagcgtgatatgaccctgattgatattcactttttcattgttgatcaggtattccacatcgccatcgaaaggcacattcacttcgacctgaccatgccagtggctggtgggcatgatatgcggtgcgcgaaactcaatctccatccgctggtattccgaatacagcgacagcgggctgcgggtctgtttttcgtcgctgctgcacataaacgtatctgtattcatggatggctctctttcctggaatatcagaattatggcaggagtgagggaggatgactgcgagtgggagcacggttttcaccctcttcccagaggggcgaggggactctccgagtatcatgaggccgaaaactctgcttttcaggtaatttattcccataaactcagatttactgctgcttcacgcaggatctgagtttatgggaatgctcaacctggaagccggaggttttctgcagattcgcctgccatgatgaagttattcaagcaagccaggagatctgcatgatgtctgcacccaaaattacatttatcggcgctggttcgacgattttcgttaaaaatattcttggtgatgtgttccatcgcgaggcgctgaaaacggcgcatattgccctgatggacattgaccccacccgcctggaagagtcgcatattgtggtgcgtaagctgatggattcagcaggggccagcggcaaaatcacctgccacacccaacagaaagaagccttagaggatgccgattttgtcgtggtggcatttcagattggcggttatgaaccttgcacggtgactgatttcgaggtctgtaagcggcatggtctggaacaaaccattgccgatacgttggggccgggcggtattatgcgcgcgctacgtaccattccgcatctgtggcaaatttgcgaggacatgacggaagtctgccccgatgccaccatgctcaactatgttaacccaatggcgatgaatacctgggcgatgtatgcccgctatccgcatatcaaacaggtcgggctgtgccattcggtgcagggaacggcggaagagttggcgcgtgacctcaatatcgacccagctacgctgcgttaccgttgcgcaggtatcaaccatatggcgttttacctggagctggagcgcaaaaccgccgacggcagttatgtgaatctctacccggaactgctggcggcttatgaagcagggcaggcaccgaagccgaatattcatggcaatactcgctgccagaatattgtgcgctacgaaatgttcaaaaagctgggctatttcgtcacggaatcgtcagaacattttgctgagtacacaccgtggtttattaagccaggtcgtgaggatttgattgagcgttataaagtaccgctggatgagtacccgaaacgctgcgtcgagcagctggcgaactggcataaagagctggaggagtataaaaaagcctcccggattgatattaaaccgtcacgggaatatgccagcacaatcatgaacgctatctggactggcgagccgagtgtgatttacggcaacgtccgtaacgatggtttgattgataacctgccacaaggatgttgcgtggaagtagcctgtctggttgatgctaatggcattcagccgaccaaagtcggtacgctaccttcgcatctggccgccctgatgcaaaccaacatcaacgtacagacgctgctgaccgaagctattcttacggaaaatcgcgaccgtgtttaccacgccgcgatgatggacccgcatactgccgccgtgctgggcattgacgaaatatatgctcttgttgacgacctgattgccgcccacggcgactggctgccaggctggttgcaccgttaaaacgcgactaaacgctactgcgccgggggatttattccggcgcacacctctgacgataccaataacagaaggcgggcgttggtaacagcgacccgataccctatgagcatttcaatgactacaaaactcagttatggatttggagcgttcgggaaggattttgcgatcggcattgtgtatatgtacctcatgtattactacaccgatgtcgtcgggctgtctgtgggtttggtcggtactttgtttctggtggcgaggatctgggatgctattaacgatccgattatgggatggattgtaaatgctacgcgatcgcgatggggtaagttcaaaccctggatcctgatcggtacgttggcaaactctgtaatcttatttctcctctttagtgcgcatctgtttgaaggtactactcagattgtctttgtttgcgtgacctacatcctctggggcatgacttacaccattatggatattcccttctggtcgctggttccaaccatcacgctcgataaacgtgagcgcgaacaactggttccttatccgcgtttttttgccagtctggcaggctttgttacggcaggtgtgacgctaccatttgttaattatgtcggcggtggcgatcggggatttggctttcagatgttcactctggtactgatcgccttttttattgtttcaaccatcatcactctgcgcaatgtgcatgaagtcttttcgtcagacaatcaaccgtctgctgaaggaagccatctgacacttaaagccatcgttgcgctaatttataaaaacgatcagctttcatgcctcttgggtatggctcttgcttataatgtagccagcaacattattaccggctttgctatctattatttctcatatgttatcggtgatgcggatttgttcccctattatctgtcgtatgcgggagctgctaacctggtgacgttagtattcttcccacgcttagttaaatcattatcccgacgcattttatgggccggagcatctattcttccggtgttaagctgtggtgttctcctgttaatggcattaatgagctatcacaacgtcgtcctcattgtgattgcgggtattttgctgaatgtgggaacggcgcttttctgggtattacaggtcatcatggtggcagatatcgttgattacggtgaatataaactgcacgtacgctgtgaaagtatcgcttactccgtgcagactatggtggtgaagggcggttcagcctttgcggcttttttcattgcggttgtgttagggatgattggctatgtaccgaatgttgaacagtctacgcaagccctattaggtatgcagtttattatgattgctctaccaactctgtttttcatggtaacgctgattctctacttccgtttctatcgcctcaatggtgacacgctgcgcaggatccagatccatctgctggataaatatcgcaaagtaccgcccgagcctgttcatgctgatattccggtcggtgcagtgagtgatgtgaaagcctgacgtggacaatagctaacgaaaatggcctgatgcgatatgtttatcaggccacgtcttaatgtaatgctttggatttgcaaattttgtagaccggataaggaattcacgccgcatccggcatcaacaaagcgcaagttgttatccggttatcaagccaaagcgccgtagctggcggcaatgaaagcgagcgaggaatatcaccgtcgttaatgcgccaagcagcgcgcagaacatatcggattgcgtgtcccactggtcgccctgggtgccgagaaaatcatccgctccctgacccattgccagcgctgcccaccactcgattaattcatacatcgcgcttatcgccagcgccacgcagcagaccaggaacgccaccattttacgtccgcgcacgtacatcccgcgaacgagaatttctcgtgccaccagtgcaggcaccagcccctggaaaaagtgccccagcttgtcatacggattacgactcaaccccagccattcctgcacctcaaaaccaacggggactttcgcgtaggtgtattgtccgccgaccatcaggatgatggcgtgaaggaaaatgagcgtatagagcagcggcgttaacggataacgtctggcggtggcaagcagtagctgcacgacaataatcaccggtgtcacttccatcagccaggtgagtttgtcatgggccgaaatgccggtataaatcaggattaacgttagcgtcagtgcgctggtgttaagaattaacggcttgagtgtgcgggtcatggtgagttcgcaaatcagggaaaatactgactattcaccagcaagcgtgaaattacaatcgcaaaagaggtggccagggggatcacctggcagcatgctgccaggcgctgggccgaagaggttacttagtgcagttcgcgcactgtttgttgacgatttgctggaagaagtcgttacctttgtcatcgaccaggataaacgccgggaaatcttctacttcgattttccagatagcttccatacccagctccggataagcgacgcactccagatgcttgatgctctgctgcgccagtaccgccgccggaccgccgatgctaccgaggtagaagccgccgtgtttatgacacgcgtcggtaacctgctgactgcggttacctttcgccagcatgatcatgctgccgccgtgggattgcagcagatccacgtaggagtccatacggcctgcggtggttgggccaagtgaacctgatggataaccggcaggggttttcgccggacccgcgtagtagatcgggtgatctttgatgtactgcggaagttctttaccggcgtcaatcagctctttcagcttggcgtgtgcaatatctcggcccacgataatggtgccggtgagcgacaaacgagtggataccgggtattgcgaaagctgggcgaggatctctttcatcgggcggttaaggtcaactttcaccgcttcgccttcaccggcctggcgcagttcttgtggaatgtactggcctgggttgtgttccagtttttcgatccagataccttcgcggttgattttcgctttaatgttacggtcagcggagcaggagacgcccatgccgaccgggcaggatgcgccgtgacgtggcagacggataacgcgaatgtcgtgcgcgaagtatttaccgccaaactgcgcgccaagaccgagtttctgggcctcttccagcagttcctgttccagctggacatcgcggaacgcctgaccatgttcgttcccttccgtcggcagttcatcgtaatagtgagcgcttgctaacttgacggttttcaggttggtttccgcagacgtaccgccaatcacaaacgcgatatggtacggcgggcaggctgcagtaccgagggtacgcattttctcgacgaggaagtttttcagtttgccgggagtcagcagggctttggtttcctggtagagatacgttttgttggcagagccgccgcctttcgcaacgcaaaggaatttgtactcatcgccatctaccgcgtacaggtcgatttgcgcaggcaggttagtgccggtgttgacctctttgtacatgtccagcgccgcattctgtgaatagcgcaggttatcttcgatataggtgttatagacgcctttcgacagcgtttcttcatcaccgccgccggtccacacgcgctggccttttttaccgacgatgatcgcggtgccggtatcctggcaggtcggcagcacgcctttggcggcgatttcggagtttcttaagaattgcagcgccacgtacttgtcgttttcgctggcttctggatcgtgaagaatagccgcaacctgtttctggtgtgccgggcggagcataaaagaagcgtcgtgaaaggcttgctgcgccagcagggtcagggcttctggttccactttcaggatggtttcgccgtcgaagtcggcaacgctaacgtaatcggaagtgagtagatagtattcggtattgtctttccccatcgggaaaggtgcctggtagataaagggtttgtttgacatagcttccagcctgtaactctgtatttgttattcgaaaatggcgtgccgcgtagtcacgggcggcacgcaaagtgcatttataagaacccgtacatcgcggcgaagatccagccgaagacgcacgatacgctcacaccaatcaaccccggcagaataaagctgtggttgatgacgaagcgaccgatgtgggtggtgccggaacggtcaaactgaatcgctgccagatcgctcggataagtcggcaggatgtaataaccgtagcaagccggtgctgaagccacgatgtatgccggatcaacgccgatcgccagcgcgaccggaacaatcgccgccagcgccgcagcctgagagtttacaaacttggaaaccagcagcagaacaatggcataggcccacggatactctttcaccatttcacccagtacgccctgaatttcagacatatgcgcaccgaacatggtttctgccatccatgcgataccgtacaccgccacgatggcgatcataccggaacggaagacttcgttttttgagatagacgcgggattggttttggtcaggataataatcagcgccccggtcagcagcataaacatctgaataaccagtaccatcgacagcggtttgccgccgaaggatggacgcaggtccgaatcagcaccaagaagggcgactacagcgattgccccgaggaaaatccacattgccagccagttgcttttcggcagttttttatccagcagcgtcgcggtatcaccgtaaacatactcacggttttccggtacggagatgaatttctggaactcttcgtctttatccagatctttaccgcggaaccagctgaagataccgatcgccaggataccgattaacgtcgatggaatggtgattgccagcagatcgaggaactcaagatggcgaccatcaaaggtgacattacccagcatcgcaaccagagacacgaccgcaaccgacaccggactggcgataatccccatctgtgcaccgatagaacttgccgccatcggacgttccggacggatgttgttcttaatggcgacgtcgtagatgatcggcagaatggtgtaaaccacatgacccgtaccgcaaagaatggtcagtgtacaggtcacaaacggcgcgacaattgagacatatttcgggttgcggcgcagcagcttctcggcaatttgcagcatgacatcaagaccgcccgaagcttgcaaggtcgccgatgccgccaccaccgcaatgataaccagcatgacatcaactggtggtttacctggctgaaggtggaagacgaagaccagaatgaccagaccgataccgcctaataaacccagcgcgataccaccctttctggcaccataaaacagacatatcagtattatgataagttggatagtaaataacatgtgtgaaccctcgcgataatcctatttaaatttttgctgaatagatcacagtcacgttctgttttgtatgaactgttttcagagcctgactaaatatccgtttggtcgttaccggctttagcaaatacctcacagtgaatattggctgattaaagcagcggcaaatttatgcactgtgataagcggctttttcagagagaaagactctctggcgatgggtttatagtttgtactgcgcagatgttaatgttttgtttgctgttatcttattgatatttatcggtctattttttgttctcagggcagatgtcattaggtttatagattaatctgatctacccatttgtgggtaaaaatacacataatgcgggtgacataatagttaattaacttttgttagcgttttgaaattaaaaacaccgttcacctgaagagatattaatttttagcgatgatggagggataattatatttgatctggcacaagttttactgatgaaggatgtaacttgtgccaggggtattttgcattacggtaataattattacttacagataaccagcgatccgttattggcaatattgtttcagtagtgagtagtgttctgcctgaatacggtaacggtaaactggacgccccgtgacgccataatggatactggtgaacaagatgtggcagttgaccagccagatgaggtatttacggcaggaaacacgcgaaatgttaacctcgttggctagctcgtcggttgaaaattcatagtcctgatgcgcgtcaatccactggcacagtgtgcgtaacgtctgcggcgttaagccttttggcaagcgacgaggatcctgttcgttggagctgctgccgtggattagctgatcaagctcggcctggtcataatactgatgtttttccagcgccattttcttttgccgccagccggtgagcgcctcttcaaagcgggaagcctggaagggtttgatcaggtaatccacgacaccgtaatgcagcgaatctttaatggttgccgcatcggctgcggaggagatgacaatcacatcacttttgcaacgcgcgttatgcaggacaggcagtaaatcgagcccgttctctttttgcatatagatatcgagcaatatcaggtcgataggcgtatcgctattgaagataatctctttggctttctccagcgtcgaggctgttccacagcattgaaagcctgggatttgtgctacgtatcggcgattcagctccgcgaccattgcgtcgtcatcgataattaatacattgatcatctgttcgacctctccccgtcccagggtatctggacaaaaaattgtgtgaaaatcccgggttccgattccacggcgatgctgccgccgagattttctacctgttgtttgacaagtgctaaaccgacgcctcgctcgcttccttttgtcgagacacctttgtcaaaaatgtgatcgattttatcgggtgcgatccccggtccatcatcattaacttcacagtgcagccagccgtgacggtagtgcaatgttacgctaatttcgcctccgggttccggccctaatgcctccagcgcgttttctatcagatttcccaacgtggtaatcagcgtcgcgacctggtcctcactgccgctgtctggcagctggctttcactgtttaaaatcagcgtatggcctaaatcggtcgcgcggttaatcttgctgattaaaaaaccagcgataaccggagatttgatcttacccagcagagagccaatctcttcctgatagttattggctgttttgagaatgtaatcttccaactgcttataactcttcagatgcaataatccgagaatcacatgcaatttattcataaattcgtgggatcgttcacgaagtgcgtcagcatagttgaccagaccgtcgagtcgctgcatcagtttacgtacttcagttttgtccctgaaggttgaaatggcaccgatgataacgccattactgcgcaccggaacggtgttgatcagtaatagccggtctttaatcgtaatctcttcgtcgcggcgcggggtaccgtcgcgtaacacttccgagacatctaccacctgtgaccatgagtggcttagcgtcgacagtttctcatcgtcctgcgacttacggtaattcagcaattcttgtgcggcatcgttgatcagcgtgacctcgccgcgatcgtccacggcaacgacgccttctttgatagactgcaacatggcctggcgttgctcaaacagcgtggagatttcgtagggttccaggccgaaaaggatttttttcagtaccttaaccagaatgcaggtgccaatcagtccgaccagcatgccaaataataccgaccagataatgctccagcgactgtcattgatctgttgggtcacacggcttaactcaaggccgatcgccaccacgccaatttgtttatgattttcatcgtagatgggggtaaatacgcgtaaagcctgcgccagaaaaccgcgattgatagcgacattttcttcgccattcagcgctttaaggatgtcatcacctttaaatggctgaccaatacgctgggcttcaggatgcgagtagcgaagactttgcatatcggtaacgacaataaacagcagatcgttgcgtttgcgtacggcttccgcgatggcctggatgccactctcctgcggttttttctgcaagccctgacggatttccggcgagtcggcgagggtacgcgccactgccagtgccttgttggctagcccatctcgcgtcatatcactgatttgcgagaagtaaatcagatgcaccaccaatagcaccgagaacagtaccgcactgaccattaagatcactgtggtactcaatttcatcggacgtttgcgtaacatgcggtagggcaatgaatgtctcatcagcttccttgtgtgacaaatttcttaagcattatctctgatgaggcgggtaattcaaagggagtaagaatgattggctatataggggaagagactctggcaacggaaactgccagtgctgtatgaagattccggggctatgcttatagcgataatcatactgatgagagagggaaggtcatggatcaggcgctactggacgggggttatcgctgttataccggcgaaaagatcgatgtctatttcaacactgcgatatgtcagcattctggcaattgcgtacgtggcaacggcaagttatttaatctcaaacgaaagccgtggatcatgccggatgaagtcgacgtcgccactgtggttaaagtgattgatacgtgcccgagcggcgcgctgaaataccgtcataaataagcgagggtaaaatggaaatacgcgaaggccacaataaattttacattaatgacaaacaaggcaagcaaatcgctgaaattgtctttgtgccgaccggagagaatttagcgattatcgaacataccgatgtcgatgaaagcctgaaagggcaagggattggtaaacagctggttgcgaaagtcgtggaaaaaatgcgtcgggaaaaacgaaaaattatcccattatgcccatttgcgaaacatgaatttgataaaacgcgggagtatgatgatattcgcagttgatgggagagtacagagtcacgatatttttcattctctccgcgatgtgatgcaggagagcatctgaagggtagggggatgcacaaagaatgggcagagagcgcgtttttttgtcccaagtcatcccctttactgagcaaaaaaaagaatatctcctatatgagaatcatcaatcggggttaataagttttgcgtccccagagcgtttaatattgataggagtcatattatggaaggtaaaaacaagttcaatacttatgttgtttcttttgattatccatcatcttattcctcagtgttcttaagattaagatcattgatgtatgatatgaatttctcctctatcgtggctgatgaatatgggataccacgacaattgaatgaaaactccttcgcaataacgacatcgttagccgcaagtgaaatcgaagatttaatcaggctcaaatgcttagacttaccggatattgattttgacctcaacattatgacagttgatgactatttccgtcagttttacaagtagccaggaaggataagaagaacataaaaaatggcactattctctaaaatattaattttttatgtgattggtgtgaacatatcctttgtcattatctggtttatctcacatgagaaaacacatattcgtttacttagtgcattcctggtcggaataacctggccaatgagtctgcctgtggcattacttttttctctcttttaggagctgtagttgagtggacccgctggttatcgtgaaacgaagcgtctctcctcaaaactggatttgcggaacgatgaacgaagcagtcgcctgactgcttcgttcattaaagtgaaatttatttctgtgggcgcatcgccgggaagagaataacgtcgcgaatagtatggctgttagtaaacagcataatcattcggtcgataccaatacccagaccagcggttggcggcagaccatattccagcgcagtcacgtaatcttcgtcatagaacatggcttcgtcgtcacctgcagctttagcattaacctgttcctggaaacgttcagcctgatcttctgcgtcgtttaattcgctaaaaccattaccgatttcacgaccaccgatgaagaattcaaaacggtcggtgatttccgggttaacatcattacggcgtgccagcggggacacttctgccggatattccgtaataaaggttggctgaatcagatgtgcttctgccacttcatcaaagatctctgtgacaatacgtcccaacccccagcttttctctaccgtaataccgatagattcagctaatgctttagcagcatcaaaattatccaggtcggccatatcggtttctggacgatattttttgattgcttcgcgcatggtgagtttttcaaacggtttgccgaaatcaaacacatgctcgccataagtgactttagtggtacccagaacctcttgtgccagggtgcggaacagtgactctgtcagttcaatcaaatcgtggtaatccgcatacgccatgtagagttccatcattgtgaactcaggattatggcgaacagaaataccttcattacggaagttacggttgatttcgaatacccgttcaaaaccgcctacaaccagacgtttcagatacagctccggcgcgatacgcagatacatatctaaatccagagcattatgatgggtaataaacgggcgagcagatgccccacctggaattacctgcatcatcggggtttctacttccataaagccgcgcgcgaccatgaattgacggatagcggccagaatttttgaacggacaacaaacgtttgacgggatttatcgttagcgatgaggtccagataacgttgacgataacggacttcctgatcctgcagaccatggaatttatctggtaaaggacgtagtgctttagtcagcaggcgcagctcagtacagtgaatggaaagctcacccgtttgcgtcttaaacagcgtaccgcgggcaccgataatgtcacccagatcccattttttaaactgatcgttataaacaccttctggcaggctatctcttgcaacgtacagttgaatacggccaccgacatcctgcaacgttacaaaggaggctttccccatgatacgacgggtcatcattcggccagcaaccgagacttcaatgtttaaggattccagttcctggttatccttcgcatcaaactcttcgtgcaactggtcagaggtatggtcgcggcgaaaatcattgggaaacgccacaccttgctgacgtagtgccgccagtttttcgcggcgatttctcagttcatcgttaaaatcaatagcctcattggctccccgtgtttcttgttcagacattttggttcctctaaatccagctttcaatttagcgtagataaagagacagatcggtacactgtattatctgcctcgactattagtaactcagtttatcttatcgaaactaacgcttacctcaagttgatatcactaataaataaccatcaaaatggtttaaatgacttattaatctcgatttgttagtgttataaactgaaagttaatttattcataaccaattgtttttacgacagttaatcgttgctctcctgtatcatattcgtcggcgtgctaaacagaaaacgggtagcaaaggccaatacgacgatgatcgcgacacaagccaacgtccactctcccatctgagaaaagaatcgctggtaagctgcaattgccataccgctaatttgcgactctgtcgtctgctgtgccacgacgcctgccagccagttggcgaccgcgcctgttgccagcatataaatcccggttaatacgccagacattttcagacgcgtgatttgcgcaatcgccaccgggtcaataaagagttcggcaaagcccattagcgccagcccggatatcatcacgcccattgacgcttgaccgtcagccgctgcatgtcgggcatcaaatgccaacaacataaagccacaagccatcagcagtaagccaaaggcaaacttcagccagacgcgcaatgttgagttgccgcggctttctggcgacgccagccaggccagtacaaccccagcgagcatcaccgcaattgcattcaccgactggaatagtgctgtaggtacttcaatattgaatgcctgacgattcacaaagcgatcgataaacaagctgatggtactgccgccctgttgtgccagtacccagaacaatgtcccgacaaacatcaacaatacaatttgccaaagagcacggcgatgttcggggaatttgatcatcatgcgggcaatgatttgtgcggcaatgaggcaaacgatcgccagcaaatatccggaccagtcgttctccagcagcagagtaaaaaatactggggctaaacagagcatcaccactaaccagctccatactggtaaggcaaatttgacactagtgagcgcttttttatccatactacgtgtggactggaaatgacgatgaccgcttaagaaaatcaacaaaccgataaacatgccgccacccgcaagggcaaagccaacatgccatccataccactgagcagccaggccgcaggcgattggggctgcgatagaaccgatattgcccgcagcatacagcagcgaaaaaccgccatcacgtcgatgatcgttctcgtcgtagagctcgccaagcaaacagctgatgtttgatttgaataaaccgtagccacaaataatgattgccagcgccagatacaggctaaaggttgaatttgtatcaatacccagcaccacatggccaagggtcattaacagcgcgccggcaatcactgcagtgcggttgccgagcaggcggtcggcaagccagccgccgagaataggggtaacgtaaaccagagaagcatatgcgctgaacaggctgatggcatggttatcatcaaaaccaagctgatgggtgagatagagaatgagtaaggcacgcatgccgtaaaaactgaagtactcccagatttggatcgccacgatatagtatatcgcgcgcggctgtgagggtgttttcatgtgttctccttatgagcaaaaaagggaagtggcaagccacttcccttgtacgagctaattattttttgctttcttctttcaataccttaacggtatagcggccatcagcctgacggtatgcaccgtgaatatcggtttcaaagcccggatagtgagcgccgatttcacacagcatctgcaggaactccagaaccggacggctttcttcggtgatcatttcacccggcattaccagaggaactcccggcgggtacggaaggatcatattggcgttaatacgacctaccatttcgtcgaggtaaacttcttcggtcataccgtgcagctctttctggaatgcagcatacggagtcattaccatcgtcggcagcacttcaaatgcgcgatacatcagatccggcagattgtggtgaacaatcagtttgtggatattctgagccagttcctgaatacgcatgttttcatagaattcaggatcttcacgatacagagacggcagcatgtttttcacacgcaggttcaggtcgaacgcacgtttaaagtcagtcagagcacgcagcaggctcagtgctttggtcttatcgataccgatgctgaacaggaacagcaggttatacggaccggttttctcaacaacgatgccatgttcgtcgaggtatttcgccacgatgctggccggaataccaaagtcgctcatggtgccgtctttttccatccccggagtcagcagggtgactttgatcgggtcaagatacatgtgctcgttatcgatgtttttgaagccgtgccaggtgctgtcagaacgcagcggccagcattcagtcgtatcgatatgatccggctgccatacatcaaagaaccagccatcagattccgttctcagacgtttgatctctttacggaatttgatcgcacgttcaatagaaccgttgatcagacgcttacctgcattgcctttcatcatcgccgcagcggtttcagtggacgccacgataccgtagtgcggagaagtggtggtgtgcatcatgtaggcttcgttaaaggtttcttcgtttacgtcacctttaacgtggatcatggaagcctgagagaacgccgccagcagtttgtgagtggactgggtttcgtaaatcactttcccttctacacggccaccgctcataccgcatttaccttcgtaaatcggtgagaagttggtgtaaggcacccacgcggagtcaaagtggatggatttcacatccagtgttttcttgatgaagtcggtgttgtacagcagaccatcataggtagagttggtaattacagcatgtaccggccaggttgcgtttggtgtttctttcacgcgcttagcaatggtagcgtgctggaattcactctgtgggataccaccaagaataccgtaagcgttacgggtcgggcggaaatagattggcgtaacatcgctcatcatcatcaggtgggtcagcgatttgtggcagttacggtcaatcagaatggtgctgcctgctggagcagagtacataccaacaattttgttcgcagtggaagtaccgttggtcaccatgtagctgcggtctgcgttaaagacgcgagcgatatactgttctgcttctttgtgtggaccactgtgatccagcagagaacccagttcagatactgaaatggaaatatcagatttcatggtattcggaccaaagaaatcatagaacaggctacctaccgggcttttctggaatgcagtaccgcccatgtgaccaggagtacagaaagtatatttaccttcacgaacatatttaaacagtgctttagtcagcggaggcagaatagtgttgatatattcgtcagtggtctgcttgatcttattagcaatatcttcagcagcacccagcgcatattcaaagaagctaatctgtaaacgcaggtcattcaggcttacatcgagagtggaatacgtattagcgaacgcgtacaacggcaggttctcgttcattttgctaatttcttcgcacagctcgagattatatttatcccagtcaaaaataacgccgcacagacgcgcattgttttcgatcagttttaataagtcgtcacggtcgttcgggtaaacaatctggaagttcagacgttcaagcgcgcgatgaagttcacggatgggttcttctttaaaataaacccccatgtgattcaatattgcaataacgttcatagtcatatctccaggtaaaaaaggcccctcccaacacatgggacaaaatgaaaggaggagcctcggaaaatacttttaattaatgtgcgttagacgcggtgtggttatccattgagtggctctggcgctcgtgcattttgcgagcgtagaacatcaggataatcaggctgacgatgaaggtacctgccagctcgaaggagcttgcgcccatcagcgcgatgaagcagaacacgcaacccagtacagagcagatcaggctgacaaagttgcggatgttaacgccttcaaaacgaatcaggtcaacgcaagagtagaaatacggcagcatagtcagcagtactgcgataccggtcagttcaccgaacaggtcagatgctttaccaccggcagagttcatcagagtgataaggatcatcagggcagtcattttcactgcagccagcagcagaccttttttcggaataccgttgctgtcgacttcaccataaactttcgggaagttaccgtcgttagcggcacgtacacctgcctggcctaccaacatcatccaggagcccagagaagtcaggcacgcaaaggcggtgaatgcagaaaccagcggcgcagcccagttaccgaggatagttgaagcactgattgcaaacggagcaccggaagccgccattacagaagacggatacataccggaaagcacctgagtcgcagcgatgtaaacaatacctgctaaaccagtacccagcatggttgccagcggaacggtacgtttcgggtttttaaccataccagtacttacagctgcggattcaacacccacgaaggcccacaggcagagcagaatacttttaatgatcgcatgaccatcagtggtatccgcagtattccagttagctgcataagttgccgcatcaaaccaatgccagccaacaatagcagtcatcaccacaggaataagaaccagcaccagaccaatagtggttaaacggcttacccaagtaccgccgagcatatttacaaaggtaaatacccagacgatagcaatacaggcgatacccgccggaacaggatcatttaatactgggaagaaggtggaaagataagatacagcggtaataccaatcgccaggttaccaatccagttagcatggtaataaagaacacctgtctgaaaaccaaatgcaggggaaatttctccggcataagcaattgggccaccttgttgcgggttttttgttgccagtcgggcatatacatacgccagcgacattgcaccaataatagagataatccaaccccagatagcaataccaccgatacttgctaggttcgcaggtaataatgcaataccgctccccatcatattaccggcaacaacaccggtacaggcaaatagcccgatcttcttggcagaactcatgctcttctcctaatttcatttttgaatttggagtccgggtcatgatgtataactatttcctgaccagaccaaactggcgataagattactcacgaaaaaaggattaatcctaaagattaggtgaaataacacaaaagtttctgtaagtgagaacttgaggttttttattaacacatcaggatcgcaagttgatatcatgaaaagataaacatttaatgtttacaatggattgcgtgacattctctggttaaatttatgtaataaaaattatgcggcaaataaattgccgcaacatattataccaacaggaacatacaaaaactcaacaacaaatatttccgagcataaatcaacccggagttacttattctgaagcaagaaatttgtcgagataaggtacaacataaggaacagaagtctggaatataccattttcaatccagtaaagggtgtttgcccctgggcgtaaattaaaggcggtgagatatgcatcagctgcttcccggttcatccccttcatttcataaaccttgccaagcaacacataatttagccaggacatttcaagatcaatgccagtatttatcgcctggtaagactcatctgttttaccttttaccagagcactgaccgcttttatttgatatataatggacaggttgttcaattccggcagtgtaacaatgttatctatttctgtgttcagtgctgctaattgtttttcatctaaaggatgttgagaatggcgcacgatatcaactaatgctttttctgctctcgcgtaggtaaattctggggatgattgaacaatctcacctaataattcactggcacggttcaatgatttatcatcgccatgcagtaaataatcatgtgcctgataaaaattagttaataacgcaccacgatgcggcaaaattttctggagcgtctcctgcattcgttgtggccacggttggtttaacgcttttgataaactctccagtaaatcattttgaatcgccagctgattaccgttagtgatgacataacgtttatccagcatggttgaaccatctgcattgtctaccaattttatcgacataaagcattgttgagcacggtattggcgctgattaacaaacgcaatagataatgttttaccggaactgctcggttcatcaatgttgtagttgattttgtcatgcaccataaaggtggagaaggtgttaagtgatgtcgccaccaaatcacccacgcctatcgcgtaagagagctgatacggggaactccagctgttacaacttttatttaccatattaatgtcaatatcgcgtggattgagcaaaatacgcgatttgctcataggaagacgtgtatcaagacttgaaaacgctaccagtgctacacagatacctaacgacaacaggaaaaaaaaccatacccaaaaggtagtgaatcgtttgcttttaactggggattgttcaggtggcgttgcggtgttttgaatgttaagactgtgggagggagaatctgtggcaggaaccgcctctggtatagggggaggcgaagatagcattatttcctctccctcttcttcgctgtaccagataaccggcaccattaatttatagccgcgctttggtacagtagcgatatagacaggactatcttcatcattatcttttaatgacttacgtagttctgagatactctgcgtcacaacgtgattggtgacaatacttctcttccagacattatcgataagttcatccctgctaagtacttcgccactgtgttgagcaaagaaaaccagaagatcgattaatctcggctcaagggtaagttgacgcccattgcggctaatttggtttatggacggagtaacaagccattcgccaacgcgaactacaggttgttgcataatagaaactcattcgaaaagggaatgatgcaatgataattgccacaacctatttttaccatctatagatgggtttatttacatattattggtgaatgcaagacgttatttttaccagccataaacttcttgattacatagtattacgaaaggattttactgagaaccagaagtaatattccttaccatcaaaattcatcatctttgccaaagaaaaatgttcagaaaataatccatggaaaattgtccggagcacttactattttaatggattgttagtctttgcatgagcaagcgaactgatacatttctctttgttctcattcagaaaatctcatcagtcgccgttcagaccggtgttgtgctttatggatgcgttacgctcctgatgacgtcatttgacgttcaacagcatcacggggccgcacgacatttcacgtcagttagtgctatagctcaggaacaaattttcccgaattgggatatgcccgcaaattgctggtgatgtggggagaatctggttgagttcggtagaattgatttggaggcagaacgcttaaatcgtggcgtcctgaaacgaaaaacggacctccgtggaggtccgtttatatgaatttggtgcccggactcggaatcgaaccaaggacacggggattttcaatcccctgctctaccgactgagctatccgggcaacggggcgcattaaaccgtaatctgcacatctcgtcaacctaatttcagtaaaagcgattcaactgcttaagattgcggcaaatcgcttcttttctgtgtttctgtcaggtcaatgcaccaccctggcggcagcgggcgaagcgcaggatatcttccgccagccgatgtgcagtgtcgacatccgcctggctacgattcaccagcattcggcttaaacagccttccagcaccagttccatctgctttgctaccatcgccggatcgtcaacttccagtgtggttaacagttcgtgggtgaaatcgtaggccgcgcttttttgctgatcggccagttgatgaatagggtggccaggatcgggataaaacgtacaggcagcgataaatagacagcccggatagcggttgtttttaacgcactccgataacgcctgataacgtgccagcagcttttgttcggcggtttgcgtttcgtccagcatcagctgacgacgccagacatctatctgttggctaagataacgcagcgcatcgtagaggattgcctctttgtctggccagaagcggcgtagctcgtccagtggataatccacacgttcagcaaccatctccagcgtggtgttggcaatcccttgtaattctaataatttcagggcttctcccagtacatcttcacgttgcacgctattttcctccgtctttcccactgcaagtgtcgttcacggttggcgatcgcgcaaatgtgcgctgaaggtttcagcatccataaagcccgtgacgcgtgcttgtggatgctcctggccttgtccgtcaaaaaagagaattgtcggtaggccaaggacattaagatgctttaacagcgccacatcttgtgcgtcgttggccgtgacgttggcctgaagtaagaccgtgtctgctaacgctttttgcacctgcgggtcgctgaaggtgtatttctcaaactctttacaggcgacgcaccagtcggcataaagatctaacatcaccggtttgcctttggcttcaacgagcgcctgatttaactcatctaccgttttgatttgtgtaaagttgagatgcgtctgagtttgcgcggtatgcgtcgcaccaaatgcccaatcctgaagtgggcgcacgctaaccaatgccgctgccagcagaataatttgcacaatacgcatccagccgcgtttagcctgtaggctggtgataaaggcccagccaaagaatgcgacacccagcgccgaccacaagcgtaatccccatacatcaccaatcactcgctccagcaggaagaccggcagtgcgaggatcacaaaaccaaacgcggttttgacttgttccatccacgggccgcttttcggcagcaagcggttaccaaagacggtaattagcatcagcggcaggcccatgcccaacgcatagagataaagcgtgccgccgcccagccacatgttcccgctttgggcgatatacagcagaatcgcgctaagcggtgcggtggtgcatggtgaacagatcagtccggcaatcgcccccataacaaacacaccgccaggtgagccgccctgttggcgattgctcatcaacgtgagacgtgtttgcagcgaagaggggagttgcagggtaaacaagccaaacattgacatcgccagcaaggtaaagacgatggcgaggccaatgagcacgtatgggtgctgtagcgccgcctggaactgtaaccctgcggcggcaaccaccagacccagcgccgtgtaggtcagcgccatcccctgcacataaataaaggtcagcaacaatgctctggcagtggagagccgctgtttaccacccagcacgatgccagaaatcagtgggtacattggcagcacgcatggcgtaaaggcgataccaataccgatcaacaacgcccagagcgcggaaaagggcaattgcgcggtgggctgctcttgctgcggaacagacacaggctgtggcgctgcgttgttggcgaccacttcgcttaacggaacggttttggtttctggcggataacagaaaccggcatcagcacagccctggtaggtgacagttaacgtcgctcccgcactcgcctggttgatggtgacgggaagcgtcagccgatcgcggtaaatctcgcttttgccgtaaaactcatcttcatgccagacgccttgcggcagctgcacgtcggcaattttcgcgtgttccggcgtaatgcggatctgtttacggtagaggtagtaaccgtctttgatctgccaggtcagattaaggtcatgttggttttgctgaaaatcaaaagcaaaggcttgatccgcggggacaaattgtgaacgtcccggcgcgtcgaataatccggcaaaaacggaagtgctgcaaagtagcaggatcagcgtaaagatgcgttgagccatgagaggtaatctgtgtctccgtgtgtaacaggtaaaaccagaagttccggggtttgatatggatgatgagacttcaggcattccagcagtgcctgctggtgagatacggtagtttttaaaatcatctgcacttcgtattcttgctccagcttaccttcccagtaatagagagaggtagcgccggggatcaaggtcgcgcaggccgccagtttttccgccagcactttggcggctaaatcctgggctgtcgcttcatctggtgccgtacatagcaccacgacagacgcggtattcgaacttttttcatcaagcataaacacctcgcaagaacagatggaaccgcaagagagaggtcactatacaacggacgggggaaggatgttagtcggcgggaaagaaagcggggcgtgaacgccccgcgattgatcattacagcatgaagctacccagcacgaagccgaagcaaacggccagggcaacacccagagtacccgggatgaagaacggatggttgaagacgaatttaccgatacgggtagtacccgtgtcatccatctgtaccgcagcaaccagcgtcgggtaggtcggcagaatgaacagaccagacaccgcagcgaaagaagcaacagcggtcagcggtgaaacgttcagtgccagagccatcggcatcagtgcttttgcggttgcagcctgagagtacagcagagcagaagcaaagaagaagatgacggccagcagccacggatgaccctgaatcacttcaccagcggtatctttgatccagtcgatgttgttggaaacgaaagtatcgcccagccacgcaacacccaggatacaaatacaggcgctcatacctgctttgaaggtgctggagttgaggatgttgtcggtatcgactttacagataacggtggtcagagttgcaacgctgagcatgatgatcaggattgcgttggtggtgttcatcagcggtttttcaaccagacccatgcttgggctgttgatgattgcatagataaccacgccaactacgcccagcaggaacagccagacggacgtttttgcaccggatttgatttcaatctgcttttcaccgcgcagttcaaccaggccctcttccagacgcttgcgataaatcggatcgtcagagagtttggagttgaacagcatagtgaccaggaaggacatcaccagaaccgccagcagggtggacgggatgaccacggagagcagatggaggtagctgatgccatgaccttccatcacggaagacatgtaaaccactgccgctgagattggcgatgcggtgatcgcaatctgcgcggataccactgcagtagacagcggacggcaaggtttaacgccttgttccttcgcaacttcagcgataactggcagtgtcgccagagagatgttgccagtaccagcaaagatagtcaggaaataggtcacgatcggtgcgaggatcgtgatgtatttcgggttacggcgcagcagcttttctgtctgatgaaccagatagtccagaccgccagcaacctgcatggcagaaaaatagcggcgataaccgccatgataatggagatgacatcgaacgggatgttaccgggtttaacgccaatagcggcaagaaccagcacccccaatccgcctgcaaaaccaatacctattccccccaatctggcgcccaagaagatcgccagcaaaactatgatgagttctacaactagcatattagccttccttgttttttaacaagttgatattagattgttatttttaagttactgctcacaagaaaaaaggcacgtcatctgacgtgccttttttatttgtactaccctgtacgattactgttcgctttcatcagtatagcgttttgctttgtaagccgggtgcatcagattctgtacggagaaaatatcgtcaagttccgcttcagtcaacagaccgcgttccagaacgacttcacgtacactcttaccggtttcggcacagattttacccacgatgtcaccgttgtggtgaccgatgaacgggttcaggtaagtaacgataccgatagagttgtaaacgtaaccttcgcacacttctttgttagcagtgatgccgttaatgcatttttccagcaggttgtagcaagcgttggtcagaatgtgaacggattcgaacatggcctggccaatgaccggctccataacgttcaactgcagctgacctgcttctgctgccatggtaacagtggtgtcgttaccgatgactttgaagcatacctggttaaccacttccggaacaaccgggtttactttagctggcatgatggaagagcccgcctgcagttccggcaggttgatctcgttcaggccggcacgtgggcctgaagagagcaagcgcaggtcgttacagattttggacatcttcacagccaggcgtttcagcgcgccgtgaaccataacataagcgccgcagtcagaggtcgcttcgatcaggtcttcagccggtacgcatgggaagccagtaacttcagccagttttttcactgccagcggagagtactctttcggcgtgttcagaccagtaccgattgctgttgcaccaaggttaacttccagcagcagttcagcggtacgttggatgtttttcacttcttctttcagcaggatgctgaaagcgcggaattcctgaccgagggtcatcggtactgcgtcctgcagctgggtacgacccattttcaggatgtcctggaattcgacagctttacgttcaaagccttcacgcagttggttaatcgcatctaccagcttaatcagggaagagtaaactgcgatacggaaaccggtcgggtaggcgtcgttagtggactgacatttgttaacatggtcgttcgggttcaggtactgatattcacctttttggtgacccatcagttccagaccgatattggccagcacttcgttggtgttcatgtttacggaagtacctgcgccgccctggtagacgtctaccgggaactgatccatgcattttccgttgttcaggacttcatcacatgcggcaatgatggcattcgctacacttttaggaatggtttgcagctctttgtttgccatagctgcggcttttttaaccattaccataccgcgaacaaattcaggaatatcactgattttgttgttgctgatatagaagttttcaatcgctctcagagtgtgaacaccatagtaggcatcagctggaacttccctggtacccaacagatcttcttcgatacgaatgttgtttgacatgtgaaccttctttttcaagctgccaatgatttgctttaaacacacagaatatatgtggtttcgaatgtttttcgaccgacgattatcccctgcatcgaccgaatacccgagatcatatgctgcttgaggatttctaccgtaatctggatcactttaagtgtcggtttttaccccttaattattaatttgtgaaatagatcaccgctttgggattactaccaaaaatagttgcgcaaacatcttgaaattttgctaatgaccacaatataagctaaacgcgattcgcaacccattcaggtagccggggttaaccggctgctattacaggagaaacctttgcgctggttaccttttattgccattttcctttatgtctatattgagatttcaatctttattcaggttgcccatgtattgggggtattgctgaccctcgtgctggttatattcacgtcagttatcggtatgtcactggtacgtaaccagggctttaagaatttcgtgctgatgcagcaaaaaatggcggcgggtgaaaacccagcggcggagatgattaaaagtgtttcgctgatcattgctggtttgctgcttttattaccgggcttttttaccgacttcctcggtcttctacttttattgccgccggtgcaaaagcatctgacagtgaagttgatgccgcatttgcgcttttctcgcatgcctggcggcggttttagcgccgggaccggtggcggtaatacttttgatggtgagtaccagcgaaaggatgatgagcgcgaccgccttgatcataaagacgatcgccaggattaatgtcgaaacgccggattatgtggttatgccattttccggcgtttttcgttttggcagcaacagccataaccccgccagcatgatcagcgcatagagacttttccagccgaccattgccagtaacagaacgcataacagcccgccaaccaccgccagtagtcgataacgtccttgcaataatttacagcctgccagcatgcataacagataaatcataataaagatgccattggcataaataataagagcgtccagattgatctctaaagcatgaatcaccaaagtgctcaccacacagcagccgagcaccgcattgagggcattattcgggatatggcgagaagagaggcgtgccaggtagtggtcaggattatgttgcgcctgcgaccagaccaggcgggcgaagctctgtatataaatgttgagactggcaaagcaggccagatagccaatcacgcaggcaatccataacgctcctacaccgaacaactgcactacaatttttggaagcgatgctgccgccgccattttttcaccataggcgtcgaagtgtaagacgactaccgtacagccccagtagactaatcctgccagcagcagaccaatcatcaaagcacgaggaaaatcacgctctggatttttaaattccgaggcgagatgggcaaatgcctccagaccgacaaaacaccagaacatcactgataacgcagcaaataacccggtaagttcgatattaccaggtgccggaaaggggatattcgcaggtttgatatcgcccgcccaccagatagcgacaatcagcgcgacgataagtccggcaataacggtttgtagattagcactggaactggcaccgcgagtaccgatataccacaccagcgccagcgtaccgagttctgccaacaacagttgccagctatgccagccaaacatcgcctggccgaacccggcggcaatttgtagtgcggcaggcaaacccacgggaatgaccgataaaaacagccagccggtgactcgctcaagccgcgaaccaaacgccataccgacgaagtgcgcgacgccgcctgcgctgggatagtggcgacccagaatcgcaaacacaatcgcaatcgggaacactaagataatcaaaacgggccacgcccacaggctgttattgcccgctaccagcgcagctaacgcaggaacggcaaacacgccagtgcctaataatgacgtcgatagcaggccaatgccctgggccagccccagttcttgtttgagtccactcatgggttgatgtccgattgcgcccaaattttgggcaactgcgtagattttcgatggtagcacaatcagattcgcttatgacggcgatgaagaaattgcgatgaaatgtgaggtgaatcagggttttcacccgattttgtgctgatcagaattttttttctttttcccccttgaaggggcgaagcctcatccccatttctctggtcaccagccgggaaaccacgtaagctccggcgtcacccataacagatacggactttctcaaaggagagttatcaatgaatattcgtccattgcatgatcgcgtgatcgtcaagcgtaaagaagttgaaactaaatctgctggcggcatcgttctgaccggctctgcagcggctaaatccacccgcggcgaagtgctggctgtcggcaatggccgtatccttgaaaatggcgaagtgaagccgctggatgtgaaagttggcgacatcgttattttcaacgatggctacggtgtgaaatctgagaagatcgacaatgaagaagtgttgatcatgtccgaaagcgacattctggcaattgttgaagcgtaatccgcgcacgacactgaacatacgaatttaaggaataaagataatggcagctaaagacgtaaaattcggtaacgacgctcgtgtgaaaatgctgcgcggcgtaaacgtactggcagatgcagtgaaagttaccctcggtccaaaaggccgtaacgtagttctggataaatctttcggtgcaccgaccatcaccaaagatggtgtttccgttgctcgtgaaatcgaactggaagacaagttcgaaaatatgggtgcgcagatggtgaaagaagttgcctctaaagcaaacgacgctgcaggcgacggtaccaccactgcaaccgtactggctcaggctatcatcactgaaggtctgaaagctgttgctgcgggcatgaacccgatggacctgaaacgtggtatcgacaaagcggttaccgctgcagttgaagaactgaaagcgctgtccgtaccatgctctgactctaaagcgattgctcaggttggtaccatctccgctaactccgacgaaaccgtaggtaaactgatcgctgaagcgatggacaaagtcggtaaagaaggcgttatcaccgttgaagacggtaccggtctgcaggacgaactggacgtggttgaaggtatgcagttcgaccgtggctacctgtctccttacttcatcaacaagccggaaactggcgcagtagaactggaaagcccgttcatcctgctggctgacaagaaaatctccaacatccgcgaaatgctgccggttctggaagctgttgccaaagcaggcaaaccgctgctgatcatcgctgaagatgtagaaggcgaagcgctggcaactctggttgttaacaccatgcgtggcatcgtgaaagtcgctgcggttaaagcaccgggcttcggcgatcgtcgtaaagctatgctgcaggatatcgcaaccctgactggcggtaccgtgatctctgaagagatcggtatggagctggaaaaagcaaccctggaagacctgggtcaggctaaacgtgttgtgatcaacaaagacaccaccactatcatcgatggcgtgggtgaagaagctgcaatccagggccgtgttgctcagatccgtcagcagattgaagaagcaacttctgactacgaccgtgaaaaactgcaggaacgcgtagcgaaactggcaggcggcgttgcagttatcaaagtgggtgctgctaccgaagttgaaatgaaagagaaaaaagcacgcgttgaagatgccctgcacgcgacccgtgctgcggtagaagaaggcgtggttgctggtggtggtgttgcgctgatccgcgtagcgtctaaactggctgacctgcgtggtcagaacgaagaccagaacgtgggtatcaaagttgcactgcgtgcaatggaagctccgctgcgtcagatcgtattgaactgcggcgaagaaccgtctgttgttgctaacaccgttaaaggcggcgacggcaactacggttacaacgcagcaaccgaagaatacggcaacatgatcgacatgggtatcctggatccaaccaaagtaactcgttctgctctgcagtacgcagcttctgtggctggcctgatgatcaccaccgaatgcatggttaccgacctgccgaaaaacgatgcagctgacttaggcgctgctggcggtatgggcggcatgggtggcatgggcggcatgatgtaattgccctgcacctcgcagaaataaacaaacccccgggcagaaatgtctgggggtttttcttttggtcatctttctagtataagattcagacacggacgacgcgagtggcgtccagctcattgattatggggaataacatgcacgtaaaatacttagcagggattgtcggtgccgcgctactgatggcgggttgtagctccagcaacgaattgagtgctgccggtcagagtgtacgcattgtggacgagcagccaggcgcagagtgccagctgattggtactgcgacaggtaagcaaagcaactggctttccgggcaacacggagaagaaggcggttctatgcgcggcgcagcaaacgatctgcgcaaccaggcggctgcaatgggcggtaacgtgatttatggcatcagtagcccgtcgcagggaatgttgtccagttttgtcccgacggatagccagattatcggtcaggtttataagtgcccgaactgatgtgatccagaggctgggtgacaaacgtataattgcctgatgcgcttcgcttatcaggcctacataaggcattgcaactgattgaatgcttgagaatttgtaggccggataaggcgtttacgccgcatccggcatgaccaacgatcacgttatcagtcatttcaggctggatggctccagcctcgcattagcaaagatgagattatttcgcctgtggtgcagttttgctggtggattgaacacgtaagtgatgcagcgcgcgtaagcattgatcctgggttagcggttgggcgttattcgccgctacggtgcgaacatagacctgacatggcacacccgcgagttttttcagtcgtgggctgaaatcaagcattcggcgagtgatcgcttctatttctttacccggcgttgcttcacgcgttttcaccactgcgccgctaaattgttctttgccactttcatctttaaagcggtaaagcaccgccagataatggtcgaacaagttatgtttccattccggttgggaataggtgtcatattccagattgccattgtcctggcagtcaacgtcgtataacggcaggaaatctaacagtgaggtaatacgtaatgccagttcacgcatttccgcattattaattgcatgaatgattgctcgcgccagcatttcaatctgcaactcattgacgactaactcacatttgctaccgtcatgtagcgttaatacgaaggtaagattttcgccttgattatcggtaagttccagcgtgttaacccgacgattaatatcggcatttttaagctcatcaaccagaatttctgggatgttttctgccattttcttaatgactttatcgcgagcttgctcatactgaaggtgtgcagcagcatccagtttatgcttttgatgcagacgactttccagcgcaatcagcaggtcgcgcagttccatgacagacataaagaacaacgattctttattgcgaggttctttaattttcagcgccagtgcaatgaaattattactcttgcgaataacaccggtattaacacccttgatgcttatggccatgtaggttctccctaaccatttctcaattaaataattaattttaatttataagccagataaatgggcttggtagtaatagttgttaaaataacataaatagccgtactcactctatataaacagaaaagaaaggttaattattggtgttagctatataaaaagtaacaacagcaatgcatatgaataattaaaggttatgcaacgggcaaagattaaacttcccagtttaatgacaggttgctgtacttgcgtttgttgctcttgccggatgcagcgtaaacgccttatccggcctacagttcattgcaaatccattcaatttcaatgcacgatgtaggcctgataagcgtagcgaatcaggcaattttaatgtttaacttccctgtttaatcagttactgctggcgtagctggagatccagcggcgttttgctgggttcgccgccaatttctcgcgccagtttcggcaccagatatcccgacaccagtgtcagcaactcacgcataatctgccgtgcttcgtcatcactcaccataaaatgcgccgcgccctgtactttatcgagcacatgcaggtaatacggcattacgccggcatcgaacaacgcattactcaggtttgccagcgtttgtgcgttatcgttcacatcacgtaacagaacgctctggttcagcaaagtaacgcctacccggcgcaacttagccatcgcctgacggaatgtttcatctacctcattggcatggttgatgtgattcaccagcaagatttgcagcgtagaacgggcaaagcattcaaccagcgcctcggtgatacgtgccgggatcacaatcggcagacggctgtgaatccgcagacgttttatatgcgggatggcttccagttgtgtgagcaaccagtccagctcgtgatctttcgccatcagcggatcgccgccggagaaaatcatctcgtccagttccggatgcgcagcaacatactcaagtgcagtttgccagttacgcttgttgccctgattttcggcataggggaagtgacgacggaagcaatagcggcaatttaccgcgcagccgcctttgaccagcaaaagcgcccggttgtggtatttatgcaacaaaccaggcactacgctgtgctgttcttccagtgggtcggtggagaatccgggcgcgatgacaaactcatcttgcgaggtaagtacctgacgcaaaagaggatcgtccggattgcctttctccatgcgatcgataaatgagcggggcacacgcagggcaaaaagctttttggcgctgcgtccggctaacagtttttcctccgcgtctatattcaaaagacgcagaagttcatcaggatcggtcacaacatcggcaagttgcgttaaccaatcttctctggatggggtatttagggttacaatatgcgccattttgtggcttagctaccaattaacaaatttcagagggccttatggcaacgtactatagcaacgattttcgtgctggtcttaaaatcatgttagacggcgaaccttacgcggttgaagcgagtgaattcgtaaaaccgggtaaaggccaggcatttgctcgcgttaaactgcgtcgtctgctgaccggtactcgcgtagaaaaaaccttcaaatctactgattccgctgaaggcgctgatgttgtcgatatgaacctgacttacctgtacaacgacggtgagttctggcacttcatgaacaacgaaactttcgagcagctgtctgctgatgcaaaagcaattggtgacaacgctaaatggctgctggatcaggcagagtgtatcgtaactctgtggaatggtcagccgatctccgttactccgccgaacttcgttgaactggaaatcgttgataccgatccgggcctgaaaggtgataccgcaggtactggtggcaaaccggctaccctgtctactggcgctgtggttaaagttccgctgtttgtacaaatcggcgaagtcatcaaagtggatacccgctctggtgaatacgtctctcgcgtgaagtaatgcggttgtggtgcggcctgcaggctgcaccatcacttattcaggtcagagatgatgaaacgccttatcgttcttgttttgcttgccagcacgctgctcacgggctgtaacaccgctcgcggtttcggcgaagacatcaaacatctcggcaactccatctctcgcgctgccagctaatttttcttctcttccgaaaaatcatcagattcccatcatttttggcgatgttgtctattattaatttgctataggcaaacataaataacattacctaaaaggaagacgttatggtgaagaagacaattgcagcgatcttttctgttctggtgctttcaacagtattaactgcctgcaacaccacgcgtggcgttggtgaagacatttctgatggcggtaacgcgatttctggcgcagcaacgaaagcgcagcaataagcaataacggtacgacagctgtgtcgtgccgtttgttttttctgcgatagtcacaaaggtaatagttgaaattcccctgccacctggcaaaatatccgttcaaccatcagctttgcaggacgacctgcaaacgcctcttttcaccggggacggccccaattctccggagcctgatatgtcctggattatcttagttattgctggtctgctggaagtggtatgggccgttggcctgaaatatacccacggctttagtcgtttgacgccgagtgttattactgtgacggcgatgattgtcagtatggcgctacttgcctgggcgatgaaatcgttaccagtagggacggcttatgccgtgtggacgggtattggcgcagtcggcgcggccataaccggcattgtgctgctcggtgagtccgctaacccgatgcgcctggcgagtctggcgttaatcgtattggggattattggtctgaaactcagcactcactaactaccaggctgctgtacccaaataaatttactgacatcaaacccttcccgggtcgcgactgccagcatctcctgtttcacttcgtcagaaatggttggcgtgcgggagagtatccacaggtagtcgcggtccgggccgcaaaccagcgcatggcggtattcccgatcgagtgcaataacgttataaccgccatagaaaggaccaaagaatgacactttcagcgcagcgcgagttggtgcgccggtaaagtacgctttcccttcactctgctgccacattcctctgtcagggttatagcctttattaatgacattcaggccgccgtcatcacgcaggctgtatgttgcggtgactttttccagtccacgttcaaagcggtgatcaaaacgggcaatctcataccaggtaccgagataacgtttggcgtcgaaattatttactacggtcacgccacgcggcggcgtaggagaactgcaggcaacgaccagaaatgcagctgtcgctgcggcaacgagagggagcaggcgcataaatgtttccttactggtttttttctaagtgtagatgacagcaaggaaaagcggagaaaaggtccgaaaattcggacccgatggaattttactgtagagcgttaagaatctgccaggcggcgtcgactctcgctggattgggatagtttttgtttgccagcatcacgatacccagctctttttctggaataaacgcgacatagctaccaaatccgccggtcgcccctgttttatgtacccatgatgcgcgtactgcaggagttgggggcgtaatcgcttttacggggcgtgctgccagtgcaattttattgtcactgccgttaatgatgctgtcaggatttaccggccagtccagcatttcccagcccaggccctgatacatatcgccggtttgccagtagcgagattgtgccagttgtatcccttgttgaagcgttttctcattgatatcaaggggttttaaattgctttgcacccagcgggccatatcttcaatggtcgacttcacaccataagcttcagcatctaacgccccaggcgaaacatgcactgccttaccttcgcgatatccccaggcgtaattcttttcttctgcgggcggtacattaatccacgtatggttgagtttgagtggctggaagacacgagtttgcatcgcctgctcaaaactcaaaccagacggcttcacagccagtgcgccgaacaaaccgatactggagttggcatacagacgttgtgttcctggagcccatgcaggctgccagttttgatagaagcgcagcaagtcgcttgaggatttcacctcatccggcacctgcaatggcaggccgccagcagtgtaggttgcgagatgtaatagtgtgatcccattccactgtttagcggtaagttcaggccagtattttgttgtgggatcgcttaacttgatttcccctcgagcaatagcgtcgccaccaagcacgccagtaaatgttttgctgaccgaacctaactcaaacaacgtttgctgtgtgacgggctgctttttggcgatgtccgcatagccccaggtaaagtaataaggtttaccctgataaattaccgccaccgccatacccgggatcttttgttgctctataagcggggtaattgtgcgatgcacaatatcgttgatttgttgaggggcagcaaatgtggagcaagaggcggtaattaataaggcgcagagcgtcgttttgaacatagggtctggtttccatacaaaacggcccgccataggcgggccggatttacattggcgatgcgttagattgtaacgacaccaatcagcgtgacaactgtcaggatagcagccagaccgtagaaaacccatttgcccgcaggtacgtggattttcagatcgtgcatcgcgtggtgcatacggtgtaaaccacaccacagcggcagaacgatcatcaggaacaggaatacgcgaccaatgaagctctgcgcgaacgccagaacgcgctcgtagctcagcgcatcacccggaaacaaccccagtggcagcagaatacccaccagcaggatcatcaccggcgcaatgatggcgctccacataccaccggccccgaagaggccccagaataccggttcgtcagaacgctttggatttggattaatcatctcaggctccttaccagtacagggcaacaaacaggattacgatggtggcaaccacagttaccgcccagagacttttgataattggctctggtcccattttttcgtcttttacaatgatattggccgctttcggtgccagttcaaaccaggttttggtgtgcagcagagctgccgccagagtgatcaggttaatgatcacgataaccgggttttgtaaaaagtcgacgaatcccgcccaggcttccgggccatttttcagggcaaacagcccgaaaatcagttcaatgctgaaccacacagccggaaccgccgtgccttcgcgcagcatgtaaaagcgataaaacggcaattttttccaccaggtggacgtcattggccgtacatacggtttacgtttagtcgtcatgttgcactccttagcgtggtttcagggtcgcgataagaaagtctttcgaactttctactttgccctgctgaatggccgcagccggatcgacgtgtttcgggcagacttcggagcagtagcccacgaaagtacagctccatacgccgttctggctgttcaactgcgccatacgctccttcttaccgtggtcgcggctatcttcgttataacgatgcgccagcgtaatggcagccggaccgatgaactctgggttcaggccaaactgcgggcacgcggcgtagcacaaaccacagttgatgcaaccggagaactggtgatacttcgccatctgcgccggggtctggatgttagtaccctgatccgcggtgcgggagttgccgatgatgtacggtttgatcgcttccagactttcgatgaagtgggtcatatcgaccaccagatcgcgttcaatcgggaagttagctaacgcttcaaccttcataccgtcggtgtaatcacgcaggaaggttttacatgccagttttggcacgttgttaaccatcatgccgcaggaaccacaaatcgccatacggcaggaccagcggtagctcaggtccggtgccaggttgtctttgatgtagcccagcgcatccagtaatgaggtagttgcgtcataaggcacttcatagaatgcgctatgcggtgcggtatcgacttccgggttatagcgcaccacctcaattttcaggtttttcatctcagccattcgccttctccttcttattggctgcttccgccttatcggctgcatccgcttcgccaccgtaaacgcgtttagctggcggcagcgtagtaatcttcacgtcgctgtactccaggcgagtcgtgccatcagcatcgcggaaggcgagggtgtgtttgaggaagttgacgtcgtcacgctcggtgcaaccttcgtccagacgctggtgcgcgccgcgggactctttacgtgccattgcggagtgcgccatacattcagcaacgttcagaccgtggcccagttcaatggtgtagagcaggtcggtgttgaacacgctggaagtgtcggtgatgcgcacgcgcttgaagcgttcctgcagctctgccagcttgtcgatggttttctgcatcagttccggcgtacggtagataccgcagccttcttccatagccaggcccatttcgtcgcggatcttcgcccagttttcgccgccatcctggttaaccagatctttcagacgttgttcaacgccagctgcctgcgcttcaattgccgcttcgttgccattaccggcagttgctgcacgctctgtcgcttgttcaccggccagacggccgaagaccaccagttccgccagggagttagaacccagacggtttgcaccgtgcagaccaacagaggaacattcacccacggcgaacagacctttaatgcgggtttcacagttctgatcggtttcgataccgcccatggtgtagtgtgcggtcggacgtaccggaatcggttctttaaccggatcgacgccaacgtacgctttcgccagttcgcagatgaacggcagacgttcatgcagttttttctcgccgaggtgacgcaagtcgagataaaccacatcgccacgcggcgtggagatggtgttgcctttacgccattcgtgccagaaggcctgagagactttgtcgcgtggacccagttccatatatttgtttttcggctcgcccagcggagtttccgggcccatgccgtaatcttgcagataacggtagccatttttgttgaccagaataccgccttcaccgcggcaaccttcggtcatcaggataccggaacctggcagaccggttgggtgatactgaacgaattccatgtcacgcagcggaacgccgtggcttagcgccatacccataccgtcaccggtaacgatgccgccgttggtgttgtaacgataaacgcgacccgcaccgccagtagccataacgaccgcgttagcacggatctgcaccagcgtgccttccatcatgttcattgctaccaggccgcgaacatgaccatcatcaaccagaatatccagcacgaaatgttcgtcaaaacgctggatctgcgggaattgcagagaggtctggaacagcgtgtgcagcatatggaagccggtcttatcggcggcgaaccaggtgcgctcgattttcatgccgccgaagcgacgtacgttgacgctaccatccgggcgacggctccatgggcatccccacagttccagttgggtcatttcggttgggcagtggtggacgaaataatccacgacatcctgctcacacaaccagtcgccacccgctactgtatcgtgaaagtgatattcgaagctgtcatgatcctgcgcgacagcggcggagcccccttctgcagcaacggtatggctacgcatcgggtatacttttgagattagtgcgatttttgcattcggatttgcctgcgcggcagcaattgcagcacgtaatcccgcgccaccggcgcctacaatggcaagatcggcttgaaaggtttgcacgacattcctccagattgtttttatcccacagccacgtacttcagggtaagtacctgaaagttacggtctgcgaacgctattccactgctcctttataggtacaacagtatagtctgatggataagtctgaaatttgacgagatcgatttttttagtgcgcaagagggctaaattatcactgaagatgattaatttaattactaaaccatcagatcgtgctttttttagtcactgcccaccgctgtttgattcctgcgtaaaatttgtctcgccgtcgcgttgcgagtagacttcgtgcccttgtcaaaaactggagatttaactatgagcgaaacggcatcctggcagccgagcgcatccattcctaacttattaaaacgcgcggcgattatggcggagatccgtcgtttctttgccgatcgtggagtgctggaggtggagacgccttgtatgagccaggcgacggtaaccgatattcatttggtcccgtttgagacacgtttcgttggccccgggcattcgcaggggatgaatctctggttaatgaccagcccggaataccatatgaaacgcctgctggttgccggttgtgggccggtattccagctgtgccgcagcttccgtaatgaagagatggggcgttatcacaaccctgagttcactatgctggagtggtatcgaccgcactatgatatgtaccggttgatgaacgaggtggacgatctcttacaacaggtgctggactgcccggcagcagaaagcctttcttatcaacaagctttcttgcgttatctggaaattgacccgctctctgccgacaaaacgcaactgcgggaagtcgcagcgaaactggatttgagcaatgttgctgataccgaagaagaccgcgacacgctgctacaattgctgtttacctttggcgtagagccaaatattggcaaagaaaaaccgacctttgtgtaccactttccagccagccaggcatcactggcgcaaatcagtaccgaagatcatcgggtcgctgaacgctttgaggtttattataaaggtattgagctggcgaatggtttccatgaattgacggatgcccgtgagcagcaacaacgctttgaacaagataaccgtaagcgcgcggcgcgcggtttgccgcagcaccccattgaccagaatctgattgaagccttgaaagtcggtatgcctgactgttccggcgtggcattaggtgttgatcgtctggtgatgttggcgctgggcgcggagacactggctgaagtcatcgcctttagcgttgaccgggcataattctgaaaaattactgaattaacagcgaagaatggcgtgataagcgccattctgtagcatatgttttcatttttccgttaaaggccacaatttaagactggatatttgatatcatccaggtatcaattctgtattggtttttacgctgcctgctcaatgttgcgcagtgcagttcagtgggcacgtgttatacacgcgctgaaatgaaggatggtttcatgcctcacacgataaaaaagatgagtctgataggactcatattgatgatctttacttccgtatttggatttgccaatagcccatcggcttattacttaatgggttatagtgcgattcccttttatatattttctgcattgttattctttattccattcgccttaatgatggctgaaatgggagctgcttatcgcaaagaagaaggcggtatctattcctggatgaataatagtgtcggaccacgttttgccttcattggtacgtttatgtggttttcctcttatatcatctggatggtgagtacctccgcgaaagtttgggtaccgttctcaacattcctctatggtagcgacatgacccagcactggcgtattgccggactggagcctacgcaggtggttggtctgctggctgtggcatggatgattctggtcaccgtcgttgcttctaaggggattaataaaattgcccgcattactgcggtgggcggtattgcagtaatgtgtctgaatttagtattgctgttagtaagcattactattttgttattaaatggtgggcatttcgcgcaggatattaatttccttgcatcaccgaacccgggttatcagtccggtctggcaatgctatcgtttgtggtatttgccatttttgcctatggcggaattgaagcggttggtggtctggtcgataaaacggaaaatccagaaaagaactttgccaaaggtattgtttttgccgctattgttatttcaatcggttattcgctggcaatatttttatggggcgtcagcacaaactggcagcaggtattaagtaatggttccgttaacctcggcaatattacctatgtgctgatgaagagccttgggatgacgctgggtaatgcactgcatttgtcacctgaagcgtcattgtcgctgggcgtatggtttgcgcgtattactggactttcgatgttcctcgcctataccggtgcgttctttacgctttgctattcaccgttgaaagccatcatccaggggacgccgaaagcattgtggccggaaccgatgacgcgcctgaatgcgatggggatgccgtctatcgccatgtggatgcagtgcgggttggttactgtcttcatcctgctggtttcgtttggtggcggtaccgcatcggcgttctttaacaagctgacgctgatggcgaacgtgtctatgacgcttccttacctgttcctcgcgctggctttcccgttctttaaagcacgtcaggatctcgacagaccgtttgtgattttcaaaacgcatttgtcggcaatgattgcgacagtggttgtcgtactggtggtgacatttgcgaacgtcttcaccatcattcaacctgtggttgaagccggagactgggacagcacattgtggatgattggcggccctgtcttcttctcgctgttagcgatggcgatttaccagaactattgcagcagagtggcaaaaaatccgcagtgggcggtggaataacccgatgccctatcgtctacctgacgatagggcgtaaagacaggaaatgttatggatgacaccagccgggacccggcaataaccgaagatgaaatcagggcgctgcaattttctgccggggatgtagcggaaatagagcagacgattctctcttttgtcgatgcctgccacacccgtaaagtggcgatggtggtgggtagcaccattaacaccctcaaagatcgcgatggtaaacggtggggaaacctgccggatatttattgcgcttatcttatccgatgtctggtttttcgcggggaattagtgggatacggcgatttgtttcgtatgcgctatagcgaaattaagcgaccggttaccttatgagtgcgcgcatgtttgtcttatgctgcatctggtttattgtggcgttcctctggataaccatcacttccgcgctggacaaagagtggatgattgatggacgcgggattaacaacgtctgcgatgtgttgatgtatctcgaagaagacgatacccgtgatgttggtgtgataatgacgttaccgctctttttcccttttctctggttcgctttgtggcgaaaaaaacgcggctggtttatgtacgccaccgcgctggctattttcggctactggctgtggcagttttttctgcgctatcagttttgtttgtgagccggattggttcatccggcacacaaacttacaaacttcccgcctgacgacctttgcccgcagacgtcagcgttctccccgtttgtttaccgttgaggctttccagacgcatctggaagggcgggaatggcatatcgataccgtgggcatggaagccagccagaatcagctggtggatctcatggcgtagcggcatacggtgacccatctcagcggcgtaaatacgcagctcgaaaatctgaatcccctgttgcagatccaccaggaagacttccggtgccgggttgtcgatcaccagcgagcagcgacgcgctgcggtgagcaggatttccgtcacttcttcgctattggcatcggcaggggccggtatcgtcaacaccacgcgcgtgaccgagtcagagagcgaccagttgataaactgctcggtaataaacgccttgttcggcacgattatctctttacggtcccagtcgctgatggtggtggcgcgggtgttaattttcgtcacgctaccggtgagatcgcgaattgtcaccgtatcgccaatgcgaatcggtttttcgaacaggataatcagaccagagataaagttggcgaaaatttcctgcaaaccaaaaccgagaccaacaccgagcgcggcaaccagccactgcaatttcgaccactcaataccaatcattgagaagccgaccagcccgccaatcagcatcagcagatatttggtgatggtggtgatggcgtaacccgtacccggcgttaaatccaggtgctgcaaaatcgccagttccagcagcgcgggcaagttgcgcaccagctgcgtggtgatgataaacaccagaatggcaatcagcaccgcaccgagggtaattggctccagactttctacgccctgtaccgtggaggtgacatcccacagcgaaatattttcgaggaagccgaaagcggaatggatttctgaccacagcacaatgacagaaagcagggcgatcaacatcaaaattgagcgcaccagccgcaaggattgcgcactgatggcatcgagatcgacttcgctttcatcgacttcaattgctccttccgggctactgtgatgatgcgcttcctcttcgccacgcgcacgttgcgctaacatctctgcccggcgatgcttcgcccgatcaaacgccagcctgcggcgctggatcagcatccagcggcggataacgtgataaaccaccagtagcaggaaccagatggcaaccgaggtttcaagcctcgctaacagcgcctgtgccgttgccagataacccaccgccgacgccagaatggcaaccaacggcgcgccaatcatcatgttccacagcatatggttggtaatgttgtcgccgctgccctctttgttgagatacagcggaatcccggcctttttcaggctgagggtgaccaccgccagcgcaccgcaaatgaggataaagcaaagccgtcccagcgaaccggagaattcacggtcgtcgaggttatcgaacatcatcagcgccataatcagcggcacaataagcccgatgctcatcaggtagtagcgcatcccacgggaaacacgttcgcgcggccagccaaaatgagcgataaacaagccgttcgggcgggcaaaggtggcgcaaatcatcactacccacagcagcggcacggtggccgttacaccatcgccaatcgcgaccgccagcggataaggccacgcctcgcgcaagccgtaacccagcgtcatccacagcaccggtaacggtgacgcgacgagaatcgaccagaaaagagtgcgcaacgtcagccagaagtgatcctgagtcactttgccaactttcgccgccgaacgttcaagaaaacgggtgaaatagcggcgcgagtaaatactgcaaccgaccagaatcaacgcgccaaacagcggcaaaattgtctctttgctggtcagcatcatcacactggctttgcccaactgactgaaggtgtccagcgaaatgagacgacgcagatcctgggcgatttccagcggccaggcgatggtcatcgggcgcacgtcagaggtccagaacagatagcggtgcgttgcttcgttcacctctttcagcgcatcctccagttgcccgttggagactttcagcttggtcagttccaatagtagcgtgtcgccaccctgcaacaatgagttcagcaactcacgctgagtgcgcagttgtgcttccagaatacggttttgctcggcagtcagcggctgaccgtcggcctgatgaatttgccgtagcagcggctgtttattaagcagatcctcataacgtaaccgttgcacacgcaactgcgccatttcggtatcaagctgttgtggtttcggcatttccggcagccgtgccacctgcgcccgcagcgcttcgccgagcagattggacgatcccagccattgcgactgttcacgcagcgtattcaacgcctgccggacctgtaacgtctggctggcagcctgacgctgttgcgaggcaacgagatccatccgctgcgcctgttgattcaaagccgccgatagttcgcggttaattttgaattgcgcgacgatatctttcggcaaatcggcgctgttttctgccagcaattcggtactttccagcgcccgctccgcctcaagctgacgttggctgtttaattgattacgcaaggcctgcaaatacgcatccagttgctggctctctttttccgccagctctgagcgtaagcgcgctaattcctggcggttattggcagacagctgcgccagctccagttcatcaacgagcgccttaagacgtgcagagtcagactgcaacgcgaaattttgtgcctgattgagcggagtattgccggtaagcgttcccaggcggcgctcgatctcatttaactgacggcgggcgtcggtttgctgttgcggcagttgattcagcgaatcggcaatctcgcgggcgcgctcctgctcttgctgggcctgacggcttttatccagcaactggctgctgacctggagaatttcctgattcagcgcgtcggtagacattcccggcgacacgctgcgcggctcgtcacgcatgttgtttaattgtgcgcgcagagtagcggagagtttcggataattatcgataacttgctgatattgtttgatgcgctcaagggaaccttttcgttcctcaagcgcatttaaggcagactggagcgcctctacgacttccggctgtgcgggtttcgccgcttttgcctgctccagttcctgagtgatttgtttgctatcgggggccgtcgcggcgtacgccccccaactgaggcaccaggccatcagaaaagtgataatcaggcgcacgtcagcgtttcctttgatggattagacctggtcttttttgtcgtcaaccaatgggctggcgtcgtgttctgcttcgatctcttcagcaggaagcggggcaggttcagcgtctggcgtaacaaaggtttcggtagatactgccagcggctggccaattttcgtgacagacaggctttccagttgctcaaccagattcactttacccggtgcaaacaggttgataacggtggaaccgagtttaaagcgacccatttcctggcctttcagcagtgccacagaaccgtcgttttccccggcaggccaggtccagcgcttgatgataccttcgcgcggcggcgtaatggtgcccgcccagaccgtctcaatgctgccaacaatcgtcgctccgaccagaatctgcgccattgggccaaattcggtatcgaaaaggcaaatcacgcgttcgttacgggcaaacagattcggcacgttctgagccgtgagatggttaacggagaagagatcgcccggcacgtagatcatctcacgcagaataccgttgcacggcatgtgtacgcggtggtagtcacgcggggagaggtaagtggtcacaaacgtaccgttgcggaacaggtccgccatcagatagttgcctgccagcagggcttcgaggctgtagttgtggcctttggcttgcaggattttatcttcttcgattttacccaactggctgataacgccatcggcaggcatgaccagtacattcggatcggtatcgattgggcgtacttcgtcacgcagcggacggacaaagaattcgttaaaggtgcggtagctggcggtgtccggcttttgcgcctctttcatgtcgaccttgtagtatttaacgaacagatcgataaccagttttgtcagccatcctgcccgcttgcttgcgccccaacccgccaggcgagtaagccatagtttcggcagaatgtactgtagcgaaagtttaaatgaatttaacaaggtagcctccaggccattgttttgtcgttcctgatccggcctacatgccggatcctgaaaaaaaggggacgattctaacgacggttagcttaattgtcagtcatccgtatcagaaaagtttttacgcgtttttacctgcgccatgctttccagaatacggtgatagttttcgaaacgggtttccgcgattttcccttcctcaaccgcttcccggatagcgcagcccggatcggtatcgtgtttgcaatcgcgatatttacacagacctaaatagtcatggaattcgacaaagccctgagtgatttgttccggctccaggtgccagaggccgaactcacgcactcctggggagtcaatcacatcaccgccgtgcgggaagtgatacagccgagcggcggtcgtggtgtgctgaccgagccccgagttgtcagagatatcgttggtcaggatctctttttgcagccccagcaacgcattcagcaggctggatttgccgacgccagactgcccggcaaaaatgctgatgcgcccggtcaacgcctcttccagcggttttagcccatcctgagtatggctggaaaccatcaatacgcgataaccgatattgcggtagatatccatctgctcgttgacgaacgccatgccttcgtcgtccagcaggtctatcttgttgagcacaataatcggctcaatctgcaaggtttcgcaggccaccaggtaacggtcgataatattgagcgacagctccggcaaaatggcggagacaatgacaatctggtcgatgttggcggcaataggttttacgccgtcgtagaaatccggacgcgtcaacaccgaggtacgctcatgcaccgcttccacgatccctttgacatttacgccttccgccgccggtttacccggacgccagactacgcggtcgccggttaccagcgaacggatggtacggcgaatattgcagcggtgaacgtcgccatcggcggattccacatcagcgtgcataccaaagcggctgatgacgataccttcatcaggctcgccaaacagattgtcgtcgtagtcgggcttctccttagacgttttaagacgacgctggtgattggcgttcacgcggcgctgctggcctttggagagtttatttttactcaatcgtacagactcctggtcgcccctgatgggcaaaacatctatgatacacgcaattgtggatcaatatagtcactgtgaatgggtggaaaatagcatgagtgccaatgaaaacaacctgatttggatcgatcttgagatgaccggtctggatcccgagcgcgatcgcattattgagattgccacgctggtgaccgatgccaacctgaatattctggcagaagggccgaccattgcagtacaccagtctgatgaacagctggcgctgatggatgactggaacgtgcgcacccataccgccagcgggctggtagagcgcgtgaaagcgagcacgatgggcgatcgggaagctgaactggcaacgctcgaatttttaaaacagtgggtgcctgcgggaaaatcgccgatttgcggtaacagcatcggtcaggaccgtcgtttcctgtttaaatacatgccggagctggaagcctacttccactaccgttatctcgatgtcagcaccctgaaagagctggcgcgccgctggaagccggaaattctggatggttttaccaagcaggggacgcatcaggcgatggatgatatccgtgaatcggtggcggagctggcttactaccgcgagcattttatcaagctgtaaaatttttcctggtcacgtaagcgccggaatccacttgcggcggcgtgattttgacgctaaattgaacgtcttgctgataatttcagcacttgagataaaaacgcaaaaaaaacttttttggggggttgcagagggaaagatttctcgtataatgcgcctcccgtaacgacgcagaaatgcgaaaattacgaaagcaaaattaagtagtacgcgggaatagctcagttggtagagcacgaccttgccaaggtcggggtcgcgagttcgagtctcgtttcccgctccaaaatttgaaaagtgctgcaaagcacagaccacccaagcgggaatagctcagttggtagagcacgaccttgccaaggtcggggtcgcgagttcgagtctcgtttcccgctccaaaatttgaaagtgctgtaaggcacagaccacccaagcgggaatagctcagttggtagagcacgaccttgccaaggtcggggtcgcgagttcgagtctcgtttcccgctccaaattcttctctcaataaaatatccacagcgacgcgatgcgttattgctggtttttgttgtctctgacaaactcttgtaaacagagttatccacagcctcaggctgtaatcttaatttcaaagaaacttcgcacggtgaatagtatttttttaacctattgatagataagttaaaaattaagattccgttttgtcgagtcgatcacttgacgattttattcgtcttgaattgcaatgcgtttttatttttattcacaagctgtggatgaatcaggcgtcacgcggtaaccctttttcaatcacccgaaccagacgctgttttttcggcaattgcacttcgactatgcacgcatttcgtctctctatttgctgcgcaatcgcccacgctatgtgctcatcgagaagtgggtgctcacctttacgactttccagcgctgtcaaaatcgtttcatcccaaggggcattgcctaatgctacggcgatattacgcagccaacgcaggtgaccaatacgacgaatcgccgatccttccgtgacttttaaaaacttctcttcgctccaggcgaataactcaatgagttccggtgcgtgtagcggcttacgcgggctgaaatcctcttctgtggtgagttgtgaatagcgattccacgggcagataagctggcagtcatcgcaaccgtaaatacggtttcccattaacggtcgcaactcttccgggatcgccccttcaagttcgatggtgagataagagatacagcggcgagcatcgacggtatatggctcgacgatggcaccggtcgggcaaatcgtcatacaggccacgcatttgccgcatccttcctcgactggttgatccacgggcagcggaatatcgaccagcaattcgcctaaaaagaagaacgaaccggcctcgcgattgaggataagtgagtgcttacctgtccagccgagcccagctttttcagctaacgggcgctcgagaataggcgcagaatcgacaaacggtctaaaattcagcgaaacacaatgttgctgaatcatctcgcccagctttttgagtcggttgcgcagaagtttgtgatagtcacggcccagcgcataacggctaacatagccgagtttggggtttttcagcgtgctggcaaatgcggcgttagcaggaaggtaattcatccgcacgctgatcacgcgcagcgtaccgggcaataactcatgagggcgagcgcgcagcataccgtgacgtgccatccagtccatttcgccgtggtattgtttgtccagccatgcttgcagtttgggctcggactcgctgagatcggtatcggtaatacctacctgctgaaagcccagttccagcccccactgtttaattttttgcgctaactgattgagatcgaggggctctgacatgacggaccatacaatgaagaaaaaccccgtaagtataccacacaccgtctggtacgccgacgatatccgccgcggagaacgcgaggcggcagatgtgctggggctcacactctatgagctgatgcttcgcgctggcgaggccgcattccaggtgtgtcgttcggcgtatcctgacgcccgccactggctggtgctgtgcggtcatggtaataacggcggcgatggctacgtggtcgcgcgactggccaaagcggtcggcattgaggtcacgttgttggcccaggagagcgacaaaccgttgccggaagaggccgcgctggcacgcgaagcatggttaaacgcgggtggcgagatccatgcttcgaatattgtctggcccgaatcggtagatctgattgttgatgcgctgctcggtaccggtttgcggcaagcgccccgcgaatccattagccagttaatcgaccacgctaattcccatcctgcgccgattgtggcggttgatatcccttccggcctgctggctgaaactggcgctacgccaggcgcggtgatcaacgccgatcacaccatcacttttattgcgctgaaaccaggcttgctcactggaaaagcgcgggatgttaccggacaactgcattttgactcactggggctggatagttggctggcaggtcaggagacgaaaattcagcggttttcagcagaacaactttctcactggctaaaaccgcgtcgcccgacttcgcataaaggcgatcacgggcggctggtaattatcggtggcgatcacggcacggcgggggctattcgtatgacgggggaagcggcgctgcgtgctggtgctggtttagtccgagtactgacccgcagtgaaaacattgcgccgctgctgactgcacgaccggaattgatggtgcatgaactgacgatggactctcttaccgaaagcctggaatgggccgatgtggtggtgattggtcccggtctgggccagcaagagtgggggaaaaaagcactgcaaaaagttgagaattttcgcaaaccgatgttgtgggatgccgatgcattgaacctgctggcaatcaatcccgataagcgtcacaatcgcgtgatcacgccgcatcctggcgaggccgcacggttgttaggctgttccgtcgctgaaattgaaagtgaccgcttacattgcgccaaacgtctggtacaacgttatggcggcgtagcggtgctgaaaggtgccggaaccgtggtcgccgcccatcctgacgctttaggcattattgatgccggaaatgcaggcatggcgagcggcggcatgggcgatgtgctctctggtattattggcgcattgcttgggcaaaaactgtcgccgtatgatgcagcctgtgcaggctgtgtcgcgcacggtgcggcagctgacgtactggcggcgcgttttggaacgcgcgggatgctggcaaccgatctcttttccacgctacagcgtattgttaacccggaagtgactgataaaaaccatgatgaatcgagtaattccgctccctgatgagcaggcaacattagacctgggcgagcgggtagcgaaagcctgcgatggcgcaaccgtaatctatctgtatggcgatttaggcgcaggtaaaaccacctttagccggggctttttacaggctctgggtcatcagggtaatgtcaaaagccccacttatacgctggtcgaaccctatacgctcgacaacttaatggtctatcactttgatttgtaccgccttgccgatcccgaggagctggagtttatggggatccgcgattattttgccaacgatgccatctgcctggtggagtggccacaacaaggtacaggtgttcttcctgacccggatgtcgaaatacacattgattatcaggcacaaggccgtgaggcgcgcgtgagtgcggtttcctctgcgggtgaattgttgctggcgcgtttagccggttaacctttgaaaggtggcgggatgatgtatcgcatcagaaattggttggtagcgacgctgctgctgctgtgcacgccggtgggtgccgcgacgctctctgatattcaggtttctaacggtaatcaacaggcgcggataacgttgagttttattggcgatcctgattatgcgtttagccatcaaagcaaacgcaccgtggcgctcgatatcaaacaaacgggcgtgattcagggactgccgttgttgttcagcggcaataatctggtgaaggcgattcgctctggaacgcctaaagatgcacaaacgctacggctggtggtcgatcttaccgaaaacggtaaaaccgaagcggtgaagcggcagaatggcagcaattacactgtcgtctttacgattaacgccgatgtgccgccaccgcctcctccgccgcccgtggttgcgaaacgcgttgaaacgcctgcggttgtcgcaccgcgcgtcagcgaaccggcgcgcaatccgtttaaaacggaaagtaaccgcactacgggtgttatcagcagtaatacggtaacgcgtccggcagcgcgcgcgacggctaacactggcgataaaattatcatcgctattgatgccggacacggcggtcaggaccctggcgctatcggccccggtggtacgcgggagaaaaatgtcaccatcgccatcgcgcgtaaattgcgtactttgctcaatgacgatccgatgtttaaaggcgttttaacccgtgacggggattactttatctcggtgatggggcgcagtgatgtggcacgtaagcaaaacgccaatttcctcgtgtcgattcacgctgatgccgcaccgaaccgcagtgcgactggcgcttccgtatgggtgctctctaaccgtcgcgccaacagtgaaatggccagctggctggagcagcacgagaaacagtcggagctgctgggtggggcgggtgatgtgctggcgaacagtcagtctgacccctatttaagccaggcggtgctggatttacagttcggtcattcccagcgggtagggtatgatgtagcgaccagtatgatcagtcagttgcaacgcattggcgaaatacataaacgtcgaccagaacacgccagccttggcgttctgcgctcgccggatatcccatcagtactggtcgaaaccggttttatcagcaacaacagcgaagaacgtttgctggcgagcgacgattaccaacaacagctggcagaagccatttacaaaggcctgcgcaattacttccttgcgcatccgatgcaatctgcgccgcagggtgcaacggcacaaactgccagtacggtgacgacgccagatcgcacgctgccaaactaaggacgattgatgccaattcaggtcttaccgccacaactggcgaaccagattgccgcaggtgaggtggtcgagcgacctgcgtcggtagtcaaagaactagtggaaaacagcctcgatgcaggtgcgacgcgtatcgatattgatatcgaacgcggtggggcgaaacttatccgcattcgtgataacggctgcggtatcaaaaaagatgagctggcgctggcgctggctcgtcatgccaccagtaaaatcgcctctctggacgatctcgaagccattatcagcctgggctttcgcggtgaggcgctggcgagtatcagttcggtttcccgcctgacgctcacttcacgcaccgcagaacagcaggaagcctggcaggcctatgccgaagggcgcgatatgaacgtgacggtaaaaccggcggcgcatcctgtggggacgacgctggaggtgctggatctgttctacaacaccccggcgcggcgcaaattcctgcgcaccgagaaaaccgaatttaaccacattgatgagatcatccgccgcattgcgctggcgcgtttcgacgtcacgatcaacctgtcgcataacggtaaaattgtgcgtcagtaccgcgcagtgccggaaggcgggcaaaaagaacggcgcttaggcgcgatttgcggcaccgcttttcttgaacaagcgctggcgattgaatggcaacacggcgatctcacgctacgcggctgggtggccgatccaaatcacaccacgcccgcactggcagaaattcagtattgctacgtgaacggtcgcatgatgcgcgatcgcctgatcaatcacgcgatccgccaggcctgcgaagacaaactgggggccgatcagcaaccggcatttgtgttgtatctggagatcgacccacatcaggtggacgtcaacgtgcaccccgccaaacacgaagtgcgtttccatcagtcgcgtctggtgcatgattttatctatcagggcgtgctgagcgtgctacaacagcaactggaaacgccgctaccgctggacgatgaaccccaacctgcaccgcgttccattccggaaaaccgcgtggcggcggggcgcaatcactttgcagaaccggcagctcgtgagccggtagctccgcgctacactcctgcgccagcatcaggcagtcgtccggctgccccctggccgaatgcgcagccaggctaccagaaacagcaaggtgaagtgtatcgccagcttttgcaaacgcccgcgccgatgcaaaaattaaaagcgccggaaccgcaggaacctgcacttgcggcgaacagtcagagttttggtcgggtactgactatcgtccattccgactgtgcgttgctggagcgcgacggcaacatttcacttttatccttgccagtggcagaacgttggctgcgtcaggcacaattgacgccgggtgaagcgcccgtttgcgcccagccgctgctgattccgttgcggctaaaagtttctgccgaagaaaaatcggcattagaaaaagcgcagtctgccctggcggaattgggtattgatttccagtcagatgcacagcatgtgaccatcagggcagtgcctttacccttacgccaacaaaatttacaaatcttgattcctgaactgataggctacctggcgaagcagtccgtattcgaacctggcaatattgcgcagtggattgcacgaaatctgatgagcgaacatgcgcagtggtcaatggcacaggccataaccctgctggcggacgtggaacggttatgtccgcaacttgtgaaaacgccgccgggtggtctgttacaatctgttgatttacatccggcgataaaagccctgaaagatgagtgatatcagtaaggcgagcctgcctaaggcgatttttttgatggggccgacggcctccggtaaaacggcgttagccattgagctgcgtaaaattttaccagtagagttgataagcgttgattctgcccttatttacaaagggatggatatcgggacggcgaagccgaacgctgaagagttactcgccgcgccgcaccgattgctggatattcgcgatccgtcgcaggcttactcggctgctgattttcgccgcgatgcgctggcggaaatggccgatatcaccgcggcggggcggatcccactgttagtgggcggtacgatgttgtatttcaaggcattgctggaagggttgtcgccgctaccgtcggcagacccggaagtacgggccagaattgagcaacaggcggcagagcaaggttgggagtcattgcatcgtcaacttcaggaggtagatccggttgcggcagcaaggattcatccaaatgatccacaaaggctttcccgggcactggaagtttttttcatttcgggtaaaactttaacggaactgacgcaaacgtcaggagacgctctaccgtatcaggtgcatcagttcgccatcgccccggcgagccgtgaactgctccatcaacgcattgagcagcgttttcatcagatgttggcttcaggttttgaagcagaagtccgggcgctttttgcccgaggagatttgcatacggacttgccttccattcgttgcgtgggttatcgccagatgtggtcttaccttgaaggcgaaatctcatacgatgaaatggtttatcgaggtgtttgcgccacgagacagttggcgaagcggcagataacctggctgcgtggttgggaaggggttcactggcttgacagtgaaaaaccagaacaggcgcgtgacgaagtattacaggttgttggtgctatcgcaggctgaatgtgtacaattgagacgtatcgtgcgcaattttttcagaatcgaaaggttcaaagtacaaataagcatataaggaaaagagagaatggctaaggggcaatctttacaagatccgttcctgaacgcactgcgtcgggaacgtgttccagtttctatttatttggtgaatggtattaagctgcaagggcaaatcgagtcttttgatcagttcgtgatcctgttgaaaaacacggtcagccagatggtttacaagcacgcgatttctactgttgtcccgtctcgcccggtttctcatcacagtaacaacgccggtggcggtaccagcagtaactaccatcatggtagcagcgcgcagaatacttccgcgcaacaggacagcgaagaaaccgaataaggtttcgggctgtttttttacacggggagccagcgatcctgcgttccccgctgatctatttagagggttatacgcttgtttgaccgttatgatgctggtgagcaggcggtactggtacacatctattttacgcaagacaaagatatggaagacctccaggagtttgaatctctggtctcttccgccggtgtcgaagcattgcaggtgattaccggtagccgtaaagcgccgcacccaaagtattttgtaggtgaaggtaaagcagttgaaattgcggaagctgtcaaagcgacgggtgcttcggtcgttctttttgaccatgccctgagcccggcgcaagagcgtaacctggagcgtttgtgcgagtgtcgtgttatcgaccgcaccggccttattttagatattttcgcccaacgtgcgcgtacccatgagggtaagttgcaggttgagctggcgcagctgcgccatctggctacgcgcctggtgcgtggctggacccaccttgaaagacagaaaggcgggataggtttgcgtggtccgggtgaaacccagctcgaaaccgaccgtcgtttgttgcgtaatcgcatcgtgcagatacagtcgcgcctggaaagagttgaaaagcagcgtgagcaggggcggcaatcgcgtatcaaagccgacgttcctactgtttcgctggtgggatataccaacgccggtaaatctacccttttcaatcgcatcaccgaagcgcgggtctacgcggcagaccagttgtttgccaccctcgacccgacgttgcggcgtattgacgttgcagatgtcggtgaaaccgtacttgcagataccgtagggtttattcgccacctgccgcacgatctggtggcggcatttaaagccacgttacaagagacgcggcaagccacattactgctgcacgtcattgatgcggcggatgtgcgtgtacaagaaaacatcgaagcggtgaatacggttcttgaagagatcgacgctcacgagatcccaaccctgctggtgatgaacaagatcgatatgctggaagatttcgaaccgcgtattgatcgggacgaagagaacaaaccgaaccgtgtctggctttccgcacagaccggagcggggataccacagctttttcaggctttgacggagcggctttccggcgaggtggcgcagcatacattgcgtctgccaccgcaggaagggcgtctgagaagtcgtttttatcagcttcaggcaatagaaaaagagtggatggaggaggacggcagcgtaagtctgcaagttcgtatgccgatcgttgactggcgtcgcctctgtaaacaagaaccggcgttgatcgattacctgatctaacggcgtagcgtctgaagcgtggagtcatatcctctggcgtcgaaagacaacagggatcaccgcataacaaatatggagcacaaacatggcgtggaatcagcccggtaataacggacaagaccgcgacccgtggggaagcagcaaacctggcggcaactctgagggaaatggaaacaaaggcggtcgcgatcaagggccacctgatttagatgatatcttccgcaaactgagcaaaaagctcggtggtctgggcggcggtaaaggcaccggatctggcggtggcagttcatcgcaaggcccgcgcccgcagcttggcggtcgtgtcgttaccatcgcagcggcagcgattgtcattatctgggcggccagtggtttctataccattaaagaagccgaacgcggcgtggtaacacgctttggtaaattcagccatctggttgagccgggtctgaactggaaaccgacgtttatcgacgaagtcaaaccggtgaacgtggaagccgtgcgtgaactggccgcttctggtgtgatgctgacgtcggacgagaacgtagtgcgcgttgagatgaacgtgcagtaccgcgtcaccaatccggaaaaatatctgtatagcgtgaccagcccggatgacagcctgcgtcaggctaccgacagcgccctgcgtggagttatcggtaaatacaccatggaccgcattctgacggaaggtcgtaccgtgattcgtagcgatactcagcgcgaactggaagagacgattcgtccgtatgacatgggtatcacgctgctggacgtcaacttccaggctgctcgtccgccggaagaagtaaaagcggcgtttgacgatgcgattgccgcgcgtgaaaacgaacagcaatacattcgtgaagcagaagcgtataccaacgaagttcagccgcgtgcgaacggtcaggcgcaacgtatcctcgaagaggcgcgtgcgtacaaggcccagaccatcctggaagctcagggtgaagtggcgcgctttgctaaacttctgccggaatataaagccgcgccggaaattactcgcgagcgtctgtatatcgagacgatggaaaaagtgttgggtaacacccgcaaagtgctggttaacgataaaggtggcaacctgatggttctgccgttagaccagatgctgaaaggtggtaacgcccctgcggcgaagagcgataacggtgccagcaatctgctgcgtctgccgccagcctcttcctccacaaccagtggagcaagcaacacgtcgtccaccagtcagggcgatattatggaccaacgccgcgccaacgcgcagcgtaacgactaccagcgtcagggggaataacgatgcgtaagtcagttatcgcgattatcatcatcgtgctggtagtgctttacatgtctgtctttgtcgtcaaagaaggtgagcgcggtattacgctgcgttttggtaaggtactgcgtgacgatgacaacaaacctctggtttatgagccgggtctgcatttcaagataccgttcattgaaacggtgaaaatgctcgacgcacgtattcagaccatggacaaccaggccgaccgctttgtgaccaaagagaagaaagacctgatcgtcgactcttacatcaaatggcgcatcagcgatttcagccgttactacctggcaacgggtggtggcgacatttcgcaagcggaagtgctgttgaaacgtaagttctctgaccgtctgcgttctgaaattggtcgcctggacgtgaaagatatcgtcaccgattcccgtggtcgtctgaccctcgaagtacgtgacgcgctgaactccggttctgcgggtacagaagatgaagttactaccccggcggcagataacgccattgccgaagcggcagagcgcgtaacggctgagacgaagggcaaagttccggtcatcaacccgaacagtatggcggcgctgggtattgaagttgtcgatgtgcgtatcaagcagatcaacctgccgaccgaagtgtctgaagcgatctacaaccgtatgcgcgccgagcgtgaagcggtagcgcgtcgtcaccgttcacaaggtcaggaagaagcggaaaaactgcgcgcgactgccgactatgaagtgaccagaacgctggcagaagctgagcgtcagggccgcatcatgcgtggtgaaggcgatgccgaagcagccaaactgtttgctgatgcattcagtaaagatccggacttctacgcattcatccgtagcctgcgtgcttatgagaacagcttctctggcaatcaggacgtgatggtcatgagcccggatagcgatttcttccgctacatgaagacgccgacttccgcaacgcgttaatataacgactgcggtacaggtcaataaagccaccgcatcctcagggatgtcggtggttttctttttctataaggataatgaatgaattcgacaatctggctggcgcttgccctggttttggtactggaaggtttagggccgatgctttacccgaaggcatggaagaagatgatctctgcgatgaccaatttgcccgataatattttacgtcgttttggcggtggacttgtggttgcgggcgttgtggtctactacatgttgaggaaaacgattggctgaacaaaaaacagactgatcgaggtcatttttgagtgcaaaaagtgctgtaactctgaaaaagcgatggtagaatccatttttaagcaaacggtgattttgaaaaatgggtaacaacgtcgtcgtactgggcacccaatggggtgacgaaggtaaaggtaagatcgtcgatcttctgactgaacgggctaaatatgttgtacgctaccagggcggtcacaacgcaggccatactctcgtaatcaacggtgaaaaaaccgttctccatcttattccatcaggtattctccgcgagaatgtaaccagcatcatcggtaacggtgttgtgctgtctccggccgcgctgatgaaagagatgaaagaactggaagaccgtggcatccccgttcgtgagcgtctgctgctgtctgaagcatgtccgctgatccttgattatcacgttgcgctggataacgcgcgtgagaaagcgcgtggcgcgaaagcgatcggcaccaccggtcgtggtatcgggcctgcttatgaagataaagtagcacgtcgcggtctgcgtgttggcgaccttttcgacaaagaaaccttcgctgaaaaactgaaagaagtgatggaatatcacaacttccagttggttaactactacaaagctgaagcggttgattaccagaaagttctggatgatacgatggctgttgccgacatcctgacttctatggtggttgacgtttctgacctgctcgaccaggcgcgtcagcgtggcgatttcgtcatgtttgaaggtgcgcagggtacgctgctggatatcgaccacggtacttatccgtacgtaacttcttccaacaccactgctggtggcgtggcgaccggttccggcctgggcccgcgttatgttgattacgttctgggtatcctcaaagcttactccactcgtgtaggtgcaggtccgttcccgaccgaactgtttgatgaaactggcgagttcctctgcaagcagggtaacgaattcggcgcaactacggggcgtcgtcgtcgtaccggctggctggacaccgttgccgttcgtcgtgcggtacagctgaactccctgtctggcttctgcctgactaaactggacgttctggatggcctgaaagaggttaaactctgcgtggcttaccgtatgccggatggtcgcgaagtgactaccactccgctggcagctgacgactggaaaggtgtagagccgatttacgaaaccatgccgggctggtctgaatccaccttcggcgtgaaagatcgtagcggcctgccgcaggcggcgctgaactatatcaagcgtattgaagagctgactggtgtgccgatcgatatcatctctaccggtccggatcgtactgaaaccatgattctgcgcgacccgttcgacgcgtaattctggtacgcctggcagatattttgcctgccgggcgaacagtgtgatacattgctgtgtcgggtaagccattacgctatccgacacagtgttaaatcctcgcttttttccttccccgaactgaaataaattagcgacacagcttgtggctggtttatcatcaatataaatgtattttttcccgatttcccttttgaggttgatgtgcagttaacgagtttcactgattacggattacgtgcgctgatctacatggcgtcattgccagaagggcggatgaccagtatttctgaagtgactgacgtctacggcgtctcccgtaatcatatggtcaaaataatcaatcaacttagtcgtgccggctacgtgactgctgttcgtggaaaaaatggcggcattcgcctgggtaaaccggcgagtgcgatacgtattggtgatgtggtgcgcgagctggagcccttatcgctggtgaattgcagcagtgagttttgccacattacacctgcctgtaggttgaaacaggcactttctaaggccgtgcaaagttttcttacggaactggataactacacgcttgccgatttggttgaagagaatcaaccgctttataaattattgctggtggagtgacgaaaatcttcatcagagatgacaacggaggaaccgagatgtcacaagatcctttccaggaacgcgaagctgaaaaatacgcgaatcccatccctagtcgggaatttatcctcgaacatttaaccaaacgtgaaaaaccggccagccgtgatgagctggcggtagaactgcacattgaaggcgaagagcagcttgaaggcctgcgtcgccgcctgcgcgcgatggagcgcgatggtcaactggtcttcactcgtcgtcagtgctatgcgctgccggaacgcctcgacctggtgaaaggtaccgttattggccaccgtgatggctacggctttctgcgggttgaagggcgtaaagatgatttgtatctctccagcgagcagatgaaaacctgcattcatggcgatcaggtgctggctcagccgctgggtgctgaccgtaaaggtcgtcgtgaagcgcgtattgtccgcgtactggtgccaaaaaccagccagattgttggtcgctactttaccgaagcgggcgtcggctttgtggttcctgacgacagccgtctgagcttcgatatcttaatcccgcccgatcagatcatgggcgcgcggatgggctttgtggtcgtagtcgaactgactcagcgtccgactcgccgcaccaaagcggtgggtaaaatcgtcgaagtgctgggcgacaatatgggcaccggcatggcggttgatatcgctctgcgtacccatgaaattccgtacatctggccgcaggctgttgagcaacaggttgccgggctgaaagaagaagtgccggaagaagcaaaagcgggccgtgttgatctgcgcgatttaccgctggtcaccattgatggcgaagacgcccgtgactttgacgatgcagtttactgcgagaaaaaacgcggcggcggctggcgtttatgggtcgcgattgccgacgtcagctactatgtgcgtccgtcaacgccgctggacagagaagcgcgtaaccgtggcacgtcggtgtacttcccttcgcaggttatcccgatgctgccggaagtgctctctaacggcctgtgttcgctcaacccgcaggtagaccgcctgtgtatggtgtgcgagatgacggtttcgtcgaaaggccgcctgacgggctacaaattctacgaagcggtgatgagctctcacgcgcgtctgacctacaccaaagtctggcatattctgcagggcgatcaggatctgcgcgagcagtacgccccgctggttaagcatctcgaagagttgcataacctctataaagtgctggataaagcccgtgaagaacgcggtgggatctcatttgagagcgaagaagcgaagttcattttcaacgctgaacgccgtattgaacgtatcgaacagacccagcgtaacgacgcgcacaaattaattgaagagtgcatgattctggcgaatatctcggcggcgcgtttcgttgagaaagcgaaagaaccggcactgttccgtattcacgacaagccgagcaccgaagcgattacctctttccgttcagtgctggcggagctggggctggaactgccgggcggtaacaagccggaaccgcgtgactacgcggagctgctggagtcggttgccgatcgtcctgatgcagaaatgctgcaaaccatgctgctgcgctcgatgaaacaggcgatttacgatccagaaaaccgtggtcactttggcctggcattgcagtcctatgcgcactttacttcgccgattcgtcgttatccagacctgacgctgcaccgcgccattaaatatctgctggcgaaagagcaggggcatcagggcaacaccactgaaaccggcggctaccattattcgatggaagagatgctgcaactgggtcagcactgttcgatggcggaacgtcgtgccgacgaagcaacgcgcgatgtggctgactggctgaagtgtgacttcatgctcgaccaggtaggtaacgtctttaaaggcgtaatttccagcgtcactggctttggcttcttcgtccgtctggacgacttgttcattgatggtctggtccatgtctcttcgctggacaatgactactatcgctttgaccaggtagggcaacgcctgatgggggaatccagcggccagacttatcgcctgggcgatcgcgtggaagttcgcgtcgaagcggttaatatggacgagcgcaaaatcgactttagcctgatctccagcgaacgcgcaccgcgcaacgtcggtaaaacggcgcgcgagaaagcgaaaaaaggcgatgcaggtaaaaaaggcggcaagcgtcgtcaggtcggtaaaaaggtaaactttgagccagacagcgccttccgcggtgagaaaaaaacgaagccgaaagcggcgaagaaagacgcgagaaaagcgaaaaagccatcggcgaaaacgcagaaaatagctgcagcgaccaaagcgaagcgtgcggcgaagaaaaaagtggcagagtgatcaataccctctttaaaagaagagggttagattgctgacaaaatgcgctttgttcatgccggatgcggcgtgaacgccttatccggcctacataatcacgcaaattcaatatattgcagagatcatgtaggccggataaacgtagtgcatcaggcaaaacgtaaacaacgagtacattaatgagcgaaatgatttacggcatccacgcagtgcaggccctgctggagcgcgcccctgaacgttttcaggaagtctttattttaaaaggccgtgaagataaacgtctgttaccgctgattcacgcccttgagtctcagggcgtggttatccagttggcaaaccgccaatatctcgacgagaaaagcgacggtgccgtgcatcagggcattatcgcccgcgtgaagccaggacgtcagtatcaggaaaacgatctgccggatctgatcgcttcgctcgatcaaccgttcctgctgatcctcgacggcgtaaccgatccgcacaacctcggcgcgtgcctgcgtagtgcggacgccgcaggcgttcatgcggtgattgtgccgaaagatcgctccgcacagctcaacgctacggcgaaaaaagtagcctgcggcgcggcagaaagcgttccgctgattcgggtgactaaccttgcgcgcaccatgcgtatgttgcaggaagagaatatctggatcgtcggtacggcaggcgaggcggatcatacactctatcagagcaaaatgaccggacgcctggcgctggtgatgggtgcggaaggtgaaggtatgcgtcgcctgactcgtgaacattgcgatgagttgatcagcatcccgatggctggaagcgtttcttccctgaacgtttcggttgcgaccggaatttgcttatttgaagcggtgcgccagcgcagctaatttctcagaattatgaaaagccatccagatttggatggtttttttttgtctatagctggtaagataattacgtattgcaaatattcattttattaatatttaaacttaatctatatggaataatatatgacatggaatccgttggcgctagcgacggcgctgcaaactgtacctgaacaaaatattgatgtaacaaatagcgagaacgcattaattattaaaatgaatgattatggcgatttgcaaatcaatattctttttacttcccgccaaatgattatcgaaacctttatttgtccggtgagtagtatcagcaatccagatgaatttaataccttcttattaagaaatcagaagatgatgccgttgtcatcggtagggatctccagcgtacaacaggaagagtattacattgttttcggggcgttatcgcttaaatcttctcttgaagatatcctgcttgagataacctcgctggtagataacgcattggatctggctgaaattacagaagaatattcacactaattacaaggacgggtatttatgggaattttaaaaagtttatttacgctggggaaatcgtttatctcccaggcggaagaatccattgaagaaacccagggcgtgcgcatgctggaacagcatattcgtgacgctaaagctgaactcgataaagccggaaaatctcgcgttgatctgctggcgcgggtgaaattaagtcacgataagctgaaagatttacgtgagcgcaaagccagtctggaagcccgtgcgctggaagcgttaagcaagaacgttaatccgtcgttgattaacgaagttgctgaagaaatcgcgcgccttgagaatctcattaccgctgaagagcaagtgttgtcgaatctggaagtctcccgtgatggcgtggaaaaagcagttacagcgacagcgcagcgtatcgctcagtttgagcagcaaatggaagtcgttaaagccactgaagccatgcagcgtgcacaacaggctgtaacaacctctaccgttggcgcatcttccagcgtttcgacagcggcagaatccttaaaacgcctgcaaacgcgtcaggccgaacgtcaggctcgcctggatgctgccgcacagttggagaaagtcgcagacggtcgcgaccttgacgaaaagctggcggaagccggaattggcggtagcaataaaagtagcgcccaggatgtattagcaagactgcaacgccaacagggcgagtaatttttttgccagcctcgctaaaaggctggcaactattttaaggataaaatatgtctggttttttccagcgtctgtttggcaaggataataagccagctatcgctcgtggtccgctgggacttcatctcaatagtggctttacgctcgacacgttagcgtttcgtttgctggaagatgaattgctgattgcgctgccgggtgaggaatttacggtagccgccgtcagccacatcgatctgggcggcggtagtcagattttccgctactacacttcaggcgatgagtttctgcaaatcaataccaccggcggcgaagatattgatgacattgatgatatcaagctctttgtctatgaagagagctacggtatcagtaaagagagtcactggcgcgaggcgatcaacgccaaagcgatgggagcaatgaccttaaactggcaggaaaaacgctggcagcgattttttaacagcgaagaaccgggaaatatcgaacccgtctacatgctggaaaaagtagaaaatcaaaaccatgccaaatgggaggtccataattttaccatgggctaccaacggcaagtaaccgaagatacttacgaatatttgctgctaaatggtgaggaatcttttaacgatctcggcgagccagagtggttattttcgcgcgcgttgggtgtcgatatcccgctgacatcacttcatattattggttaattacaaggacgtttacaatgcatatactggattcacttcttgcctttagcgcctatttttttattggcgtggctatggtgattatttttctgtttatctattctaaaattacaccgcacaacgaatggcagttaatcaaaaacaataataccgcggcgtcactggcgttcagcggtacattgttgggttacgttatccccttatccagtgcggcaatcaatgcggtgagtattccagactatttcgcctggggcgggattgcactggtgattcagttactcgtttttgctggtgtcagactttatatgcccgcattaagcgaaaaaattattaatcacaataccgcagcaggaatgtttatgggaaccgccgcgctggctggcggtatttttaacgcagcttgtatgacatggtaatggacgatcatggccagaaaacgcaaatcaagaaataacagtaaaattggtcacggagcgattagtcgcattggtagaccgaataatccttttgaaccgtgccgcaatcgctacgcacaaaaatacttaacgttggcgctaatgggcggtgccgcttttttcgtattgaaaggttgtagcgatagtagcgatgtcgataacgacggcgacggaacgttttacgcgacagtgcaggattgtattgatgacggtaataatgccgacatttgcgcgcgtggctggaacaacgccaaaacggcattttatgccgatgttccgaagaatatgactcagcagaactgtcagtctaagtacgaaaattgctactacgacaatgttgaacagagttggatcccggtcgtttctggatttttgttaagccgggttattcgtaaagatcgcgatgagccgtttgtttataacagcggcggttcctcttttgcttcgcgcccagtctggcgcagcacttctggtgattactcctggcgctccggttctggcaaaaaagagtcttactcttcgggcggctttaccaccaaaaaagcgtctaccgtttctcgcggcggctatggtcgttcttccagcgcccgtgggcattggggaggctaatcatgctgagacacaacgttcctgtgcgacgggatctggaccagatcgccgctgacaacggtttcgactttcatatcatcgacaatgaaatctattgggatgagagtcgggcttaccgttttactctgcgccagattgaagagcagatcgaaaaaccgactgcggaactgcatcagatgtgccttgaggtggtggatcgcgcggtaaaagatgaagagatcctgacgcaactggcgatcccgccgttgtactgggatgtgatcgctgaaagctggcgcgcccgcgatccttcgctgtatggacggatggattttgcctggtgtggcaatgcgccggtgaagctgctggagtacaacgccgatacgccaacttcattgtacgagtcggcttatttccagtggctgtggctggaggatgcccggcgcagcggcattattccgcgtgatgccgatcagtacaatgctattcaggaacgcctgatttcacgctttagcgagctttacagtcgggaaccgttttatttttgctgctgtcaggacaccgatgaagacaggagtaccgtgctgtacttgcaggactgcgcccagcaggcagggcaggagtcgcggtttatctacattgaagatctcggtttgggcgtcggcggcgtactgaccgatcttgatgataatgtcatccagcgtgcatttaagctgtatccgctggagtggatgatgcgtgacgataacggtccgctgctgcgcaagcgtcgcgagcaatgggtggagccgttatggaaaagtatcttgagtaataaagggctaatgccgctgctttggcgcttcttccctggtcatcctaatcttcttgcgtcctggttcgatggcgagaaaccgcagattgccgctggcgaaagctatgtgcgtaaaccaatctattcgcgcgaaggcggcaacgtcaccatttttgacggcaagaataacgttgttgaccacgctgatggtgattacgccgatgaaccgatgatctaccaggcgtttcaacctctgccgcggtttggcgatagctacacactcatcggtagctggattgtcgatgatgaagcgtgcggaatggggatccgtgaagataacacactgatcaccaaagacacctcacgtttcgttccgcattacattgctggataagaatgttttagcaatctctttctgtcatgaatccatggcagtgaccatactaatggtgactgccattgatggagggagacacagtgcactggcaaactcacaccgtttttaatcaacctataccattaaataacagcaacttatacctgtctgatggcgcgctctgcgaagcggtaacgcgtgaaggtgctggctgggatagcgattttctagccagtattggtcagcagttaggaacggctgaatcccttgaactggggcggctggcgaatgtgaatccgcctgaattattgcgctacgatgcgcaaggacgccgtctggacgatgtgcgttttcaccccgcctggcacctgctgatgcaggcgctatgtaccaatcgggtgcacaatcttgcctgggaagaagacgctcgctccggcgcatttgtggcgcgcgcggcgcgttttatgttacatgcgcaggttgaggcagggtcgttatgtccgataaccatgacctttgccgccacgccattgttgttacagatgttacccgcgccgtttcaggactggaccacgccgctattgagcgatcgctacgattctcacttattgccaggtgggcaaaaacgcggtttgttgattggcatgggaatgacggaaaagcagggcggttccgatgttatgagcaacaccacccgtgcagagcgtctggaagatggctcttatcggctggtggggcataaatggtttttctcggttccgcaaagcgatgcgcatctggtgctggcgcagaccgcgggtggtctgtcctgcttttttgtgccgcgctttttgcctgacgggcaacgcaacgcgattcgcctcgagcggctgaaagataagctgggtaatcgctctaacgccagttgcgaagtggagtttcaggatgccattggttggttgttggggctggaaggggaaggaattcgtctgatcctgaaaatgggtgggatgacgcgttttgattgcgccctgggtagccatgccatgatgcgccgtgcattttcgctggcgatttatcatgcacatcaacgccatgtttttggtaatccattgatccaacagccccttatgcgtcatgtcttaagtcgcatggcacttcagcttgaagggcaaacggcgttgctgtttcgtcttgcgcgagcgtgggaccggcgtgccgatgccaaagaagccctgtgggcgcgtttatttacgcctgcggcaaaatttgtgatctgcaaaagaggtatgccgtttgtggccgaagcgatggaggtgctgggcggcattggttattgcgaggagagtgagctgccgcggctttaccgggagatgccggtaaacagtatttgggaaggttccggcaatattatgtgcctggatgtgttgcgcgttctcaataagcaagcgggcgtatacgacttattgtcggaagcatttgtggaagtgaaagggcaggatcgctattttgatcgcgcggttcgtcgtttacagcagcagctgcgtaagccagctgaagaactggggcgagagattactcatcagctattcctgctgggctgcggtgcgcaaatgttgaaatatgcttctccgccaatggcgcaggcgtggtgtcaggtgatgttagatacgcgcggcggcgtacggttgtcagagcagatccagaatgatttattgctgcgggcgacggggggagtgtgtgtgtaagcgtatacgactgatgcgacgctggtttcgattaactaaatgaaatatgtgaaaattgtaggccggacaaggcgctcgcgccgcatccggcattgttcatttgctgtagatgacactcatgcatacagtatcgcctgtacgcgccagttatcaggctgctggtcttcgtacatggtaataatgcggtaccatgacgcaccttgttcatcggcctttaacgccacgatacgttccacgtcctgcggatcccctgaaatattgctaactgagatctgacctatttcattcaggcccgtcacgcagtcagcactggcgaattctgcagactgtgccgtggcgctcgcaggataagtcactaattgcagcgagggtgaggcaagtaattgtttcatcgtcagctccatttttcgtttccccacatgttgcagggcattccatcgcggtaataaacgcccaggcttccagccggtaatttattgtgcacaggtaaacgcatagggacgcaaagcaatgtaaagctgactatgtaagttgtctgatttatttacggtacaaaatggcttgtgaataccactgtcctgtcacgatggtttcgtccaccatgacgacaacgtaataatcagcttttgcagcgacagctttcgctttgatttctgctaatgcgtcatccggagaaccccgaaccatcgtgcttacgctacctattcgctgtaacccttgcgtctggtcgcggcgaatctcttgcggatggtccgttactggcggtgctggctgtggcgtaccttgcagtgcgctacaggcacttaacatcaacaccaataataaactggcaaaccggtaaataacgctattacgtttcctgctaaccatagtgtagtgccttattaatttaactttgggggaatgttcccgaattgttacctggtacgcgattttcgaatgaaaacgtgacgaaagcgtaacccacatctcaacattatgaactaataccgccagcagaaacttgtgctaaggatttcttcatgtcataccagacaaaaaggagagacagatgattgaaatagaatcacgcgagctggcagatattcccgttcttcatgcttatcctgtcgggcaaaaagataccccgttaccgtgcgtaattttttatcacggctttacttcatccagtctggtgtatagctattttgccgttgcgctggcgcaggctggtttgcgggtgatcatgccggatgcgcccgatcacggtagccgttttagtggtgacgcagcgcggcggttaaatcaattctggcaaatcttgctacaaagtatgcaggaattcactactttacgtgcggcaatagccgaagaaaactggctgcttgatgaccgtctggcagtcggtggcgcgtcgatgggcgcgatgacggcactggggattaccgctcgccaccccacggtgagatgtaccgccagcatgatgggatcgggctattttacatcactcgcccgttcactgtttccaccgctgatacctgaaacggcagcacagcagaatgaattcaataacattgtcgcgccactggcagagtgggaagcgacaaaccacctggaacaacttagtgacagacctctactgctgtggcatggcctcgacgatgacgttgtgcctgccgacgaatcactacgtttgcagcaggccttaagcgagacgggacgggataaactgctaacctgttcatggcagccaggcgtgcgtcaccgcattacgcctgaggcgttagatgctgccgtgacatttttccgccagcatctttaaacacgcagaatgctgaccccttgcgcttccagttgttgcaggatttccgggttagcatttttgccggtgataagcatatcgatttgatcggcacggctaaaaagcattcccgcgcgttcgccaatcttactgctatcaaccagtaccaccagtttccctaccacgctcagcatcttctgctctgccattgctgtcagcatatcggttttatacaacccttctgcggtcagcccttttccgctggtaaacatccagtgcccggcatagagactgttttcgctgccctgcgggcttaaagtgatggactgacttttgttgtactgtccgcccataatgatcacgctgtcatgttcttgatcgatcaggtaatttgccagcggtagataattagtgatgatttgcactggcttgccacacatttcccgcccaagcagaaacgcggtggagccgcagttgatgactacgctttcgcccggattaaccagctgcgaggccgctttagcgatacgtactttttcatcgtgattctgcgcctgatgcagattcatcggcgtccagcgcgggcgctgttgggtaatagcttctgcgccattgcgcacttttttcagtttgccgctttcgtcaagtttattgatatcgcgtcgcgcagtggcaggcgaaattcccagacgctcaacgactttctcaacggtcacaaagcccaattgtgcgagcatttccaggaggatttgatgtctttgtgcttcagtcatgagctattccgataaaatttgatttttttagatgatatttgaaatagccaggaaatactacgccggatagcgcgaacttctccacgctacccggtataaacgacagattacaggaatgacttgaacggcagatccggttcaatagtgaagcaatcatcgaaaccgcgcggatagtggtactcgaagttgtctttatccagcggccaggtaaatttgccacccacctgccagataaacggcttgaagccatacttcaggcgatcttttttcatctcccacagcacgcggatctcttgcggatcggcctggaagtttgaccagatatcgtggtggaacgggatcactactttcgcattcagcgcttcacccatacgcagcatatcggcgctggtcattttgtcggtgataccgcgcgggttttcgccgtacgatcctaacgccacgtcgatctgatgttcgttaccgtgcttcgcataatagttagagtagtgggagtcgccgctgtgatacagggagccgccaggcgttttgaacaggtagttcaccgcgcgatcgtccatgccatctggcagtacgccagccgctttttgatcggcaggcagggtgatcagtgcagtacggtcgaaagcatcaagcgcatgaatttcaatgtctttcacttttactacatcgcccggtttgaccacgatgcaacgctctttcggtacgccccagccaatccacaaatccacacaggttttcggtccgataaacggtacgtcatctgcacaattctgcatcacggcagcagcgacgttaacgtcgatatgatcgttgtgatcgtgagtcgccagtaccgcgtcgatctggcgaatcgcaaacggatcaagaacaaacggggtggtacgcaggtttggctgcagttttttcacgccagccatgcgctgcatctggtgaccctgtttcattaacgggttaccgtgactttgtttgccagtgccgcaccagaaatcaacgcaaacgttggtgccaccttccgatttcaaccagatcccggtgcagccaagccaccacatcgcaaatgtgccaggagcgacctgttcttgttcaatttcttcattcaaccagctaccccactccgggaaagtgctcaggatccaggattcacgggtgatacttttcactttactcatcgccatttaccttcatgatagttcaattcgaatcaatatgtgattggttttgattaatcctgacactattttttcaggaaggcaatgaccattttttgactttttgccagggaagttgttgttgattttgagtatggaaagatttaatggaatgtgtaattcaattaactaaatgaatttaaatggataattgtttcgttgtgtgaatcccactctatccatgtggaattatttgcgggtcgcgtcacatttaatcataaataatcttgttgtgattacttttgaaaattagagtgagtgcacaacattccgggtgtgtggaatacccggttacctcttcttcaggagatcgttatggagatcctctacaacatctttaccgtgttttttaaccaggtcatgaccaatgccccgttgttgctgggtattgtgacctgtctgggctacatcctactgcgcaaaagtgtcagcgttattattaaaggcacgattaaaaccataattggtttcatgttgttgcaggcagggtccggcatcctcaccagcaccttcaaaccggtggtggcgaaaatgtccgaagtctacggcattaacggcgcaatttccgatacctacgcttcaatgatggcaaccatcgaccgcatgggcgatgcctatagctgggtgggttacgccgtattgttagcgctggcgctgaacatctgttacgtgctgttgcgtcgcattaccggcattcgcacaatcatgttgaccggccacatcatgttccagcaggccgggttgattgccgttacgctgtttatcttcggctactccatgtggaccaccattatctgtaccgcgattctggtttcgctctactggggcatcacttccaacatgatgtacaagccgactcaggaagtgacggatggctgtggtttctccatcggtcaccagcagcagtttgcatcatggattgcctataaagtcgcgccgttcctcggcaaaaaagaggagagcgttgaagacctcaaattgccgggctggctgaacattttccacgacaacatcgtctccacggcgattgtgatgaccatcttctttggtgccattctgctctccttcggtatcgacaccgtgcaggcgatggcaggcaaagtgcactggacggtgtacatcctgcaaactggtttctcctttgcggtggcgatcttcatcatcacgcagggtgtgcgcatgtttgtggcggaactctctgaagcatttaacggcatttcccagcgcctgatcccaggtgcggttctggcgattgactgtgcagctatctatagcttcgcgccgaacgccgtggtctggggctttatgtggggcaccatcggtcagctgattgcggttggcatcctggtcgcctgcggctcctcgatcctgattattcctggctttatcccgatgttcttctctaacgccaccatcggcgtgttcgctaaccacttcggcggctggcgtgcggcgctgaagatttgtctggtgatggggatgatcgaaatctttggttgcgtctgggcggtgaaactcaccggtatgagtgcctggatgggcatggcggactggtcgattctggcaccgccgatgatgcaaggcttcttctccatcggtatcgcctttatggccgtcatcattgtaattgcactggcttatatgttcttcgctggccgcgcgctgcgcgcagaagaagatgcagaaaaacaactggcagaacagtctgcttaataaggagttttgattatgaccgtacgtattctggctgtgtgtggcaacggacaaggcagttccatgatcatgaagatgaaagtggaccagtttttaacccaatcaaacattgaccatacggtaaacagctgcgcggttggcgagtacaaaagcgagttgagtggcgcggatatcatcatcgcttctacgcacattgcgggcgaaatcaccgtgaccggcaacaaatacgtggttggcgtgcgcaacatgctctctcctgccgactttggcccgaaactgctggaagtgatcaaagagcatttcccgcaggatgtgaagtaaggacgcgccatgaaattacgtgattcgctggcggaaaataaatccatccgcctgcaggctgaagcagagacatggcaggaagcggtgaaaatcggcgttgacctgctggtggcggcagatgtggtagagccgcgttactaccaggcgattctggatggcgttgaacagttcggtccttatttcgttatcgctccgggcctggcaatgccgcacgggcgtccggaagagggcgttaagaaaaccggtttctctctggtaacgctgaaaaagccgctggagttcaaccacgatgacaacgatccggtggatatcctcatcaccatggcggcggtcgatgccaatactcaccaggaagtgggcatcatgcagatcgtcaacctgtttgaagatgaagagaattttgaccgtttacgcgcctgccgtaccgagcaggaagtactggatctcattgaccgcaccaacgcggcagcttaagaaggaattgaacatgtcattaccgatgttgcaagtcgcgctggacaaccagactatggatagcgcctacgaaaccactcgcctgattgccgaagaagtcgacattatcgaagtgggcaccattctgtgcgtgggcgaaggcgtgcgtgcggttcgtgacctgaaagcgctctacccgcacaaaatcgtactggcagacgccaaaattgccgatgcaggcaaaatcctttcgcgtatgtgcttcgaagccaacgctgactgggtgacggtaatttgctgtgcggatatcaacaccgccaaaggcgcgctggacgtggcaaaagagtttaacggcgacgtgcagatcgaactgaccggttactggacctgggaacaggcgcaacagtggcgcgatgcaggcattgggcaggtggtttatcaccgcagccgtgacgcgcaggccgcaggcgtggcgtggggcgaagcggacatcaccgcgatcaaacgtctttccgatatgggcttcaaagtcaccgtcaccggaggcctggcgctggaagatctgccgctgttcaagggtattccgattcacgtctttatcgcgggccgtagtatccgtgatgccgcttctccggtggaagccgcacgtcagttcaaacgttccatcgctgaactgtggggctaaggagcggatatgttgtccaaacaaatcccgcttggcatctatgaaaaagcgctccccgccggggagtgctggctggaacgcctgcaactggcaaaaacgttaggcttcgattttgtcgaaatgtcggtagatgaaactgacgatcgcctgtcgcgcctcaactggagccgcgagcagcgtctggcgctggtcaatgcgattgttgaaaccggcgtgcgcgtgccgtccatgtgcctttctgctcatcgtcgtttcccgctgggcagtgaagatgacgcggtgcgggcgcaggggctggagattatgcgtaaagctatccagttcgcccaggatgtcggtattcgcgtgatccagctggcgggctatgacgtttactatcaggaagccaataacgaaacgcgtcgtcgtttccgtgacggcctgaaagagagcgttgagatggcaagccgcgcgcaggtgacgctggcgatggagatcatggattatccgttgatgagctccatcagcaaggcgctgggatacgcgcactatctcaacaatccgtggttccagctctacccggatatcggcaacctgtcggcgtgggacaacgatgtgcagatggagttgcaggccggaatcgggcatatcgtcgcggtacatgtgaaagacaccaaacctggcgtcttcaaaaacgtgccgtttggcgaaggtgtagtggatttcgaacgttgtttcgaaacgctcaaacagagtggctattgcgggccgtacctgattgagatgtggagcgaaacggcggaagacccggcggcagaagtggcgaaagcgcgtgattgggtgaaagcgcgcatggcgaaagcgggcatggtggaggcggcataatgcaaaagctaaaacagcaggtatttgaagccaacatggagctgccgcgctacgggctggtgacctttacctggggcaacgtcagcgctatcgaccgcgaacgcgggctggtggtgatcaagcccagcggcgttgcctacgaaaccatgaaagcggccgatatggtggtggttgatatgagcggcaaggtggtggaaggggagtatcgcccatcttccgacactgcgacgcatctcgaactctaccgtcgttacccgtcgcttggtggcattgtccatacccactccactcatgccaccgcatgggcgcaggcggggctggcgatcccggcgttaggcaccacgcacgccgactacttctttggcgacattccgtgtacgcgcgggttaagcgaagaagaggtgcagggcgagtatgaactgaacaccggcaaagtgattatcgaaacgctgggcaacgccgagccgctgcatacgccgggaattgtggtgtatcagcacgggccgttcgcctgggggaaagatgctcacgatgcggtgcataacgcggtggtgatggaagaagtggcgaaaatggcgtggattgcccgcggcattaacccacaactcaatcacatcgacagcttcctgatgaataaacacttcatgcgtaaacacggtcctaacgcttattacgggcagaagtagaacacgcgctgcggaaatttccttcctcgggagataactggtctaattccgcagccgtttttcaaaaaaaagccccctgcgaagggggcaaagcaaactatggcaatgtttcgttggttatacctggtgctagcgataaatatccgcgctggcgtgcatattgccgttactccccggttcccgcatcagaattacgtggtagtacgttgcgccttgcgcatctgtttcttcatttaatgcctgacgtgcttcgctttcagtggcgaaattatgattgatataaatcacgcctaagctttgcacatcgtccatatttctggcctggtggttattaatttcaatggctgcccatgtatttgcacttagcaaaagcacagccagaagggctaaaacacgactgaacatagatacctcctcgacggctgactttgtgtgctctcctctgtgatgatcttctgatttaattttaatcaatgataaagaagttgatggtgaccatttctgatgcagttgttcaaaaaaacaccatgatgaagtgtgatgaacttcaaatcagcgtgttagaggttaattgcgaaaggggagatttatttcggctctgcccttgagtttagcgaggcatacaagtactataacgcgtcatttttcagccgacctttaacacgttccttgcctccccgggattcggctgacccagacaggaggctgaataatccgtaaggagcaattcgatgcgtcattacgaaatcgtttttatggtccatcctgaccagagcgaacaggttccgggcatgatcgagcgctacactgctgccatcactggtgcagaaggcaagatccaccgtctggaagactggggccgccgtcagctggcttacccgatcaacaaactgcacaaagcacactacgttctgatgaatgttgaagctccgcaggaagtgatcgatgagctggaaactaccttccgcttcaacgatgccgttatccgcagcatggttatgcgtaccaagcacgctgttaccgaagcatctccgatggttaaagcgaaagacgagcgccgtgagcgtcgcgatgatttcgcaaacgaaaccgctgatgatgctgaagctggggattctgaagagtaatttctgatgaccaaccgtctggtgttgtccggcaccgtgtgcagggctccccttcgaaaggtcagtccatcaggaattcctcactgccagttcgtgcttgagcatcgttctgtgcaggaggaagccggctttcaccggcaggcgtggtgtcaaatgcccgttattgttagcggacacgaaaaccaggccattactcacagtataacggtcggcagtcgcataaccgttcaggggttcatttcatgccacaaggcaaagaacggactgagcaaaatggttttgcatgccgagcagattgaattgatagattctggagactagccatatggcacgttatttccgtcgtcgcaagttctgccgtttcaccgcggaaggcgttcaagagatcgactataaagatatcgctacgctgaaaaactacatcaccgaaagcggtaagattgtcccaagccgtatcaccggtacccgtgcaaaataccagcgtcagctggctcgcgctatcaaacgcgctcgctacctgtccctgctgccgtacactgatcgccatcagtaatcggtcacggtccattaatacgactttgagaggataaggtaatgcaagttattctgcttgataaagtagcaaacctgggtagcctgggtgatcaggtaaacgttaaagcgggctatgctcgtaacttcctggtaccgcagggtaaagctgttccagctaccaagaaaaacattgaattcttcgaagctcgtcgcgctgaactggaagctaaactggctgaagttctggcagctgctaatgctcgcgctgagaaaatcaatgcactggaaactgttaccatcgcgtctaaagctggcgacgaaggtaaactgttcggttccatcggtactcgcgacatcgctgacgctgtaactgcagctggcgttgaagtggctaagagcgaagttcgtctgccgaacggcgttctgcgtaccactggcgaacacgaagtgagcttccaggttcacagcgaagtattcgcgaaagtgatcgtaaacgtagtagctgaataattcgttattcaacgagacgtaaaaacgccgaccattggtcggcgttttgctttctatttttcgtcaggtattagtttcgcaagtagatccattcaccattctcttgtgtccataagtcaggatggtttgctggcgttagatacatacgagcgcaactgatgtctcgctcctgcggcactcgctcgaaacccaaacccgagtagattgcggctgaacttgataaggaacgcagaccaattttcaaatcatggggtaaatcagaatacgcgtttagcaatgcagcaatgatgaatccgagggcattagaaacgcctgtaacagtgcgaagttggtcgatataaagatcgattgttggtagttcagatgaccagcaattaggcatttgggcaggaagggttacaacgtatcctatcgtttggccggtatagtctggagtaccataaccaggtcccaaaaccacttcgtgtattgtgtatttactgttgggttcgaaggattcgacatcttgcaataaatatttcagttctgcggttaacctcgcacccgcgtaagctttattgtatttctgggcgtgaatattatctaatgtagcttcatggttccatccaaaagaattatcaccattcattgtgattccatcgtaagcattacacctcgtcgctaacttattgaatgcttgccagtctgagagatctagtttgtggatctcaacagtacgtctgccatcgcaattatgatctcttccacgatttgaaagtaatgtagcgcgtgcgtattgatgaaattttaattttactggtttgtcggtggacgaaaaacgagataaatatgcaggaaatgaataaatagtcgttggtaatgtcattgtaatgttacctgtttaatgtttttataaatatcgcagctgaatgttcacagaaaaaaatcgatattaataaaaataagtttgttttctgaagtggtgaaaatagcggatggtgaaagatattaatatcaaaaatcgctcattatggatataacgatgcacccggggagaaaatgacttccacgccttacaccgtacattcttgttgtgcggtatgtaattattctacgctgtcggtatcggtgtattcgttaatcagcaggttagccagccacaaaaagccattgagaaaattattgattttacatgggattattatattgctaatccttggtttttaaaaattgtgcatagtgaaaatcaaagtaaaggtgtgcattatgcaaaatcacagcgtctcttagaaattaaccatgcgcacttgcagttaatggaatccttattggatgaagggaagaaacacaatatttttaagccagatatcgacccattgcaggtgaatattaatattgctgcgcttggcggatattatttgatcaaccagcatacgcttggcctggtttatcacatcagtatggtttcaccccaggcactggaagccagacgtaaggtcatcaaagagacaatccttagctggcttttggttgacccttcatctaccgcgcacgaataaaactgccatccggctggcgggtgaacaggacctgttgattattccccgtatcaatggttaagcccgtcaccacgccgctggcgttctggcggattttcaccatctgcccgttttgcaaattactcagcggcttacccgcgccttctacctgcgccattgcatagacatcggtagcgggcagtccgtggtcgcggaacagctgcgccatcgttttaccgggttcgacacggtaagagcgccattgattatcaattccgctatctggctggaatggttgcgtttgggtagtttgcggctgctcttctggctggccttcctgtataggttctggagcgaccggagccacctgatcaggatcattttgtggggtaactaattgcgcccgcagctgttcttctgtcggcggttgtgattgcgactgaatatctaactgcgcttcacgcgtcaccaccggcgcgttgggcgtatcatcagatggaagcagaaatccgaccaccaatacaatggcggcaataatgatcccccgacgatgcatcggcggcagcgggtccatgaagcgaaaattgtccggcgcgtgccagactttctccagggttggttttagttcaaagcgcccgggcatggtttcctcctgctccgcgtcttgttcctcaatcatagcctatgaataagctaacgctatgatgtccgtggtaaacccgcctttattatattcatacgggatattgctattgtttctttttccctgggatttgtcatcattcccgcgacaaagttttacccaaagaagtgtggctgatatgctgcccgctactttataccctaagaaaggaaatacgatgaccaccccaacttttgacaccatcgaagcgcaagcaagctacggcattggtttgcaggtagggcaacaactgagtgaatctggcctggaagggctgctgccagaagcactggttgcaggtattgccgatgcgctggaaggcaaacatccggctgttccggttgatgtggtgcatcgcgcgctgcgtgaaatccacgagcgcgccgatgccgttcgtcgtcagcgtttccaggcgatggctgctgaaggtgtgaaatacctggaagaaaacgccaaaaaagaaggtgtgaatagcaccgaatctggcctgcaattccgcgtgatcaaccagggtgaaggcgcaattccggcacgtaccgaccgcgttcgtgttcattacaccggtaaactgatcgacggcaccgtgtttgacagctccgttgctcgtggtgaacccgctgaattcccggttaatggcgtgatccctggctggattgaagcactgactctgatgccggtaggttctaaatgggaactgactatcccgcaggaactggcatatggcgagcgcggcgcaggcgcatccatccctccgttcagcaccctggtgtttgaagtcgaactgctggaaatcctctaagcagcgcattctgttcccctcgaacgagaggggagcaggcattcagcaataaacccttcagtttgccaaacggcgctattttgtgttgcaaagaccccgtaagcgtgtatttttgtgagctgtttcgcgttatcaccgtgatatgacactcactttaaacataaaattaacattagatctaaatcttagtattcatcccgcgtattgttacctaatatcgatgagtcccgatacagattcgtcgtatcatagactgactaaaggccgtagagcctgaacaacacagacaggtacaggaagaaaaaaacatggtagatcaggtaaaagtcgttgccgatgatcaggctccggctgaacagtcgctacggcgcaatctcacaaaccgacatattcagcttattgccattggcggtgccattggtacggggttgtttatggggtctggcaaaacgattagccttgccgggccgtcgatcattttcgtttatatgatcattggttttatgctctttttcgtgatgcgggcaatgggggaattgctgctttcgaatctggaatacaaatcttttagtgacttcgcttccgatttactcgggccgtgggcaggatatttcaccggctggacttactggttctgctgggttgtaaccggtatggcagacgtggtggcgatcacggcttatgctcagttctggttccccgatctctccgactgggtcgcctcgctggcggtgatagtgctgctgctgacgctcaatctcgccaccgtgaaaatgttcggtgagatggagttctggtttgcgatgatcaaaatcgtcgccattgtgtcgctgattgtcgtcggcctggtcatggtggcgatgcactttcagtcaccgactggtgtggaagcgtcattcgcgcatttgtggaatgacggcggctggttcccgaaaggtttaagtggcttctttgccggattccagatagcggttttcgctttcgtggggattgagctggtaggtacaacagctgcggaaaccaaagatccagagaaatcactgccacgcgcgattaactccattccgatccgtatcattatgttctacgtcttcgcgctgattgtgattatgtccgtgacgccgtggagttcggtagtcccggagaaaagcccgtttgttgaactgttcgtgttggtagggctgcctgctgccgcaagcgtgatcaactttgtggtgctgacctctgcggcgtcttccgctaacagcggcgtcttctctaccagccgtatgctgtttggtctggcgcaggaaggtgtggcaccgaaagcgttcgctaaactttctaagcgcgcagtacccgcgaaagggctgacgttctcgtgtatctgtctgctcggcggcgtggtgatgttgtatgtgaatcctagtgtgattggcgcgttcacgatgattacaaccgtttccgcgattctgtttatgttcgtctggacgattatcctttgctcgtaccttgtgtatcgcaaacagcgtcctcatctacatgagaagtcgatctacaagatgccgctcggcaagctgatgtgctgggtatgtatggcgttctttgtgttcgtggtcgtgttgctgacactggaagatgacactcgccaggcgctgctggttaccccgctgtggtttatcgcgctggggttgggctggctgtttattggtaagaagcgggctgctgaactgcggaaataaccgcattatcatgctggatggcgcaatgccatccagcttttagatcactcacccgccagcgcgcgtgggaacagtacattgttttccagactgatgtgatccatcaggtcatcaatcagttcattaatgccgttatacatcgctttccaggtggtgcaggcttctggcggcggtgtgacgttattggtggtgtgtttaatcacttccagcagttcgcccgcttcatcgtgctcgctttccattacgctgattggccccattgcctggctgcccatgccttgtttgatcatcgggaagaggatctgctcttctttcatcatgtggctggaaagctcttcatgcagcatggtcaggtattttgtcagcccttttggcacgctcggtttgtcggcgtgaacgcgctcgactttagtcgcttgcagaatcagctccggcagttgctcgcggtgacgatcgtggtagcgcacgatgatatggtcgatgatttctgccagcggggcgctacgccagtctttctcaatcggttgttcagcgagctttgccagttcagcttcaatgacctcaacatccagttctttacgtgccgccgcgcgcgccagcgtctgcttaccgccacagcagtaatccatatcatatttacgaaacagagctgaagcgcgaggaatagagagcgccagttcacctaaaggttggtcgcgataagccatagctgatacctcattcttaataagataagatgtattttaaatgcatctttaaggcaaaagctataacccttacgtagcagaggcttatttaactcactgccagcgtgtcaactttctgagacagattcagttaaaggtttttctggttttgctctgaccgcgatgaccacgccaatcactaacagcgcgataccgctcagcgtcattagcggcggcatttgctggcggagtaaaaaggtgtacagcaaacctgccagcgtttcgaaaacaatcagcggcccgagaatcactgtcggtaatagctggctggcgacgttccagcagagtgcgccaacccatgagcaaagcacggctatcgcaaccatcagactaataaacaccagcggacgggggccaaagggtagggagaagtccggcgtttgcgtattcagccagtaacaagcgacgagatagccgataagtgaaaccggcagtgtgaccagcgcctgcgctgttgcccacatcatcggatgtttgtcgggattttcccgcagccagcgggcgttgcgcagggcataccacgcccagcagaccacggaaactaacgccagcacgatgccagaggtataacgtgcccagtcaaaatcggggagtccgtggtttaactcagcaatattcacacacgccaggccgatgccaatacaaatcagtgctggggcgagttttccccacgcgagtttgccgtcgcgctggctataaagcagattggcaaagacaggaatgaccaccggcagggtgccgataatcatcgtggaaacaggcgcgccagtacgttgaatggcactggcaaggcagaagtaatagatgaggttgcccatcatagtgagcatcaaggcggtaagccagtcgcgacgcgccaactgacgcagacgcacgcgtcccagccaggcaatgggcagcgcaattaaccctaacgccagataacgccccatcgactgcaacatcgccgggtattccggcacgatcaacggcccgacaaaaataagcccccacatcaaccctgctaacagggcgtacagcacgccgctaatcattactggcatccattgatctgtcagaagaaagttcaggaagcagacatgattgctcccggcatcccgtcattatcagagaggatgcgggaggatgccactttaattaactagttattaacattaaaaagatggcttacgctttcggctaacgttgtcgttgggtggccaatcaatttgctaagtgttttgctgtcatcaaacagaccgcctttcgatgcgccaacgtcagaatccgccagcatatccgccagtccgtcgggcagtccgacgcttttcagtgccgcggcgaaatcggcttcgctcagattttgataggtaacctgtttgccgctctgtttggtcagctctgccgctaactgtgtcaacgtccaggcactatcgcccgccagttcgtaaaccttgccttcgtgaccggcttcgctaatcacgcgtgccgcagctgccgcataatctgcccgcgttgctgaggcgattttgccatcgcccgccgcaccgataaatacgccgtgttccagtgctgccggggcgctggcgaggtagttttcgctgtaccagccgttgcgcagcagggtgtaaacgatgccagaatcagccagcattttctccgtctcgatgtgctcatcggcgaggccgagcggggaggtatctgcatgtagcaggctggtataagcgataaatttcacgccagccgcctttgcggcattaataacattacgatgctgcggggcacgttgacccacttcgctggaagagatcagcagtagtttttccactccctgaagtgcagatgtcagtgcggcttcatcgccgtagtcagcctgacgcacggtaatgccttgtgctgccagggcttgggcttttgccggattacgaacgatagccactatttggctggcaggaaccgttttcatcaaggattcaataacatagtgaccaagttggccagtggcaccagtaatagcgatcatgggaagtctccatcgttttgtcttgtgtttaaatacgctaacacctaaacttacttttagtaagtacgtacaaaaaggtaagtatgaaatgagtcaggttagcctgtcgcaacaactgaaagagggtaatctctttgcggaacagtgcccgtcgcgcgaggtgttgaaacacgtcaccagccgttggggggtgttgattctggtggcgctacgcgaaggtactcatcgctttagcgacctgcggcgcaaaatcggtggggtgagtgaaaagatgcttgcgcagtcgttacaggcgttagaacaggatggttttcttaaccgtatcgcgtatccggtggtgccgccgcatgtggaatatagcctcacgccgctgggcgagcaggtgagcgaaaaggttgctgcactggcggactggattgagttgaatttgcccgaggtgttggcggtgcgggatgaacgtgcggcataactgccggatgcgctgagcttatctggtctacggtgcatggcttgtagggcggataagatgcgccagcatcgcatccgccaataaatgccggatgcggttgatgatttataggccgaaaaagaagtgttttacttactcaaatccacctgataaatcgcaaacccgatatcatcggtcgcgactttattcatcggatactgccctttctctttaataaacgctgcggctttatctgacggagaggtttcgaaacggatatccagtttcttatcgccagctatcggtgctaaacgccagttgttatctgccgccgggtgaatttcccccgcacgtttcgactcatcagcaatccacgctgccagcaccgagcggttctcatccggtgaagcaaaagcgatatggctgtcgcccgtaccggcaaatttgccgccgtaagcgcgatagttattggtggcaaccaggaacatggcgttcggatcaatcggcttgccattaaaggtcaggttcttaatcctttccgcattggcattaatcatctggcactcgccgtcataacgggcgggctgggtaacatcaatctgataattcacaccatcaataacatcaaagttataagtgcggaaaccatcccagttgatgagtgactgtggtttcgtgctgttgggatcaatctggttaaactgtcccgcggagcactccagccactctttcacctctttaccgctggctttcaccacaatcagcgtattgggatagagataaagatcggcggcattacggaaggtcaactggcctttttccacctccacatagcttgccgggtcatttttgcgaccaccgactttaaacggtgcggcagctgaaagcaccggcagttttgccagatccggatcgccctgaatgtaatgctcgacatacgctttttgcgcgttgttcaccacctgcacggtcggatcgtcctgcaccagcgccagatagctatacatattgtcggcagatttaccgattggcttgctgacgaactggcgtgtggcatcgtgatcggctttgagtgtttctaccagcttgctgtcttccgccgcgagggattttttattagcgatgtcgtaaatcggtcgtgcttccgctttcgcctgcgtcacctgccatttaccgctgtcattactgagttgtaagtcgaccacaccaagatgatcgccccacatgcctggcattaccgccggaacaccattcagcgtgcctttggcgatatcagccccttcgatatcagcaaaatctttacctgggaaaacggcgtgagcatggccaaacataatggcgttaacgcccggaatttcactgaggtaataaactgagttttccgccatcactttatacggatcggcagatagcccggaatgtgccagaacgacaacaacatcggcacctttctcgcgcatttcaggcacgtatttgcgcacggtttcggtaatatcattcaccgtcactttcccggataaattagctttatcccagcccatgatttgtggtggcacgacgccaatatagccaatcttcagcgtctgtttttttccgtctttatcgaccacttcggtgtctttaattaaatacggtgtaaacattggctgtttggttctggcgtcaatgacgttggcatttacataagggaatttcgctcctgccagcgcatttttcaggtaatccagaccgtagttaaactcgtggttgccaagcgttccgacggtatagtccagcgtatttaatgccttatagaccgggtgaatatcacctgcttttaatcctttcgccgacatgtaatcggccagcggactcccctgaatcaaatcgccgttatcaaccagtacgctgtttttcacttcattgcgggcatcgttaatcaggcttgccgtacgtaccagtccgaatttttccgtggcggtgtctttgtaataatcgaaatccatcatgttgctatgcagatcagtggtttccatgatacgcagatcgaccgtcgctgcattcacactggcggcaatcagcgtggccaggagcgttgcgctaaacttaatcatcagggacatccttttatcatcgggaatacgaaagaaaagggagaataaacgtcttacttatagaacagtgaagaatgccacaattttacgctttgaaaatgatgacactatcacagttggcgcattcattaacgatagggtataagtaaaacaataagttaacaccgctcacagagacgaggtggagaaatgttagatcaagtatgccagcttgcacggaatgcaggcgatgccattatgcaggtctacgacgggacgaaaccgatggacgtcgtcagcaaagcggacaattctccggtaacggcagcggatattgccgctcacaccgttatcatggacggtttacgtacgctgacaccggatgttccggtcctttctgaagaagatcctcccggttgggaagtccgtcagcactggcagcgttactggctggtagacccgctggatggtactaaagagtttattaaacgtaatggcgaattcaccgttaacattgcgctcattgaccatggcaaaccgattttaggcgtggtgtatgcgccggtaatgaacgtaatgtacagcgcggcagaaggcaaagcgtggaaagaagagtgcggtgtgcgcaagcagattcaggtccgcgatgcgcgcccgccgctggtggtgatcagccgttcccatgcggatgcggagctgaaagagtatctgcaacagcttggcgaacatcagaccacgtccatcggctcttcgctgaaattctgcctggtggcggaaggacaggcgcagctgtacccgcgcttcggaccaacgaatatttgggacaccgccgctggacatgctgtagctgcagctgccggagcgcacgttcacgactggcagggtaaaccgctggattacactccgcgtgagtcgttcctgaatccggggttcagagtgtctatttactaaattcagatggcagaaacagtgtatttcctgattctgccatcctgatttctcccaacctaaaaagttataaataaaaagagattgtatttaaagtgcaaaaattcaattgctaataagttacattttaataatgagcgttttttgatagtttacttctatagtgagatatttaatggcgacataaagtaaccaaataaaataaggttgtcatatgttacccaggatcagacacaataattttattggtgcggtggagttatttgtaaagtcttcgtatacaaaaacacattcaaacaatttttttaacaacatccatcatgcatttaagaaaaaagattggatttcgaattatgatagcctgttaactttgagggagttctttcgttgcgcaactcagattgataaaagtggttatcaggtgctttcatcaaaaaatgaaactgttcacgccatggataagtttcttatcagtttcagccttaaagataacggtgccgaatatacaatgacattgcgaggtagtggatttgaatacgaagaaatacccataacaataaatgaatataactcattcatggatttcaaaaaccgtgaatttccgttagaacaaaacagacgattgtatgcctgggatattctacagaaaaaacagtctgacataccgaaaaggattaaaggttatattcaccaggcgattggtgacgtgtctttaggttatgccttattggaggatatagtaagcaaattaaaacggggtaaatttgaactccaaataccaggaggtggaattaaagaatgcgatggatggtatatttacgaaaaaataattgatgataattttgccatagtcatagaatctttgggctttgcgcttaaaatctatggaggggatgaacgttttcgtaatggttcctctgttgttttggaggatgaagattactctcttatttataattttctggttaatgcaggttgccaacaagtcgaattagccgaacaagtggatgcgatagtaagtgcgaatctggccgcagatagcgatattaccaaagaaaagatttgcgagaaatataaatcgaccattgaggcgtttaaaaaagagcaactagcgttaccagtattagttcggcgtaagaactcagagacttaattcccctatcccatagataacgataggggaaaattatttttgcagaatttatgttattgccattatttgagcaacttttgcagcaggtccatcacttgctgcacctcttccggtgtgagcgccccgtctttggcccattgcacgcgaccatccttatccagcaccactacagcggaactttcttcatccagctgccaggcaccgagcgcgacgccattgctatcgacaataaactgcgaccagggataaagctttttattactctccagactgctgcgcacaaacatccctgaacccggaatcgcgtcgtcggtgttaacaatggtggtggtctggtaacgatcgtgcggtaacttcgctgatttaatcgcttcaatcagcgtcgcgtttttctcttttgcagaggtgcgaccagcaatatgttgcagtactcgcacttttcccactaactgcgcgctgttccaggttttgtagctaaactgatctttatcaagcaccaactcgccccgatcggtaatgccaatcggcggcactcgctgaccggtttcgaactgatgtgcggaagccatcatcggcaacagcaggcaggtgagtgccagaatcttgcgtagggtcatggtgtttccttcttatgatatgcaggtgatccgaccacttgggtctgagttttaatcatatgtgctatttatcgaatttcccgcaagtgtgatgccagtttgcggtcaagcgcacaaatcatatgaaaaatgaatgcttatactgaagaccgcgcttcggtaaaaagataattctgaataattgtaacctttaggtaaaaaaagttatacgcggtggaaacattgcccggatagtctatagtcactaagcattaaaatttgcgcctcataatagttgggccgattgtggcaccgcacaggcgtaatactcagcaggagataacaatgaaaattttccaacggtacaacccacttcaggtggcgaagtacgtaaagatcctgttccgtggacggttatacatcaaggacgttggcgcttttgaattcgataagggtaagattcttatcccaaaagtgaaggataagctgcatttgtcagtgatgtccgaagttaaccgtcaggttatgcgtctgcaaacagagatggcttaaccaaagtgctatgcagtaaaaagtgctatgcagtaataagacggctcctgattcaggagccgttgatgtttctgggggttacgcgacgctttcttctttatctttagcgtcaggcagttttggcgaaagggcggtggccttgctgtcgatccgggtcaccagcagctggtcgatgcggtagttatcgatatccaccacttcaaatttgtagccggcgaatttcaccgaatcggtgcgtttcgggatcttacgcagcataaacatcataaagccgccgatggtttcgtagttgcccgactgcgggaactcgtcaatatccagcacgcgcatgacgtcgtcaattggggtgccgccgtcaatcagccatgagttctcatcacgggcgacaatctgctcttccagcccctgaccgaccagatcgcccatcagcgtggtcatcacgtcattgagggtgatgatccccaccaccagcgcgtactcgttcatgatcaccgcgaagtcttcacctgcggttttaaaactttccaacgcctctgaaagggttaacgtatccggcacaatcagcgtgttgcgaatttgtacgccgctgttcagtgccaggctttggttagccagcacgcggttcagcaggtctttagaatcgacataaccgatgatgtggtcaatatcttcattacagacgaggaacttagagtgcggatgttccgccaccttattcttcaggctttgctcatcttcgtggagatcaaaccaaatcacgttttcacgcggtgtcattgaagacggaacggtacgggattccagctcaaagacgttttcaatcagctcgtgttcctgtttacgtaacacgcccgccagcgcaccggcttccactaccgcgtagatgtcatcagaagtgatgtcatctttacgtaccattggcagtttgaaaatacggaagattatgttcgccaggccgttgaagaaccacaccagcggggtgcaaacgtacaggcagaagcgcatcgggttgatgatacgcaaagccacagcttctggcgcaatcataccgatgcgtttcggggttaaatccgcaaacaggataaacatgccagtcactaacgagaaagagagaataaagctcagttgctcagagagctctgccgacatatagcgggagaacaggctgtgaaaagctggagaaaatgccgcatcaccgacgataccgccgagaatcgccactgcgttcagaccgatttggaccacggtaaagaacatgccgggattttcctgcatattcagaacgcgttgggcatttatattgccttcatcagccagcagtttaagtttgattttgcgtgaggcggcaagcgagatctcggacatcgagaagaacgcacttacagcgatcaagcagagtatgactaaaatactgtttaacatatcttatccgacctttcaggccagatcctcggaaggggaagttgattaatttgtgtgaaatacacattgaaagccgattcgaagaaagtgaaccggcattttcagtggctagtatagcgtaaggtactgtaaagccgccagagggttaaaattcagacagctgaaaaatgcaaaactgcctgatacgctatgccgatcaggcctacgcagtccttgcaatatattgaatttggacgattttgtaggcctggtaagtcgtttacgccgcatcaggcatagacaaagagcactttatcaacaaactacatttgtacccgtaacgctatgcttccggcggcagacagacgccaattccgccaattccacagtaaccatacgggtttttatgcagatattgctggtggtcatcttcggcataataaaacggtgtggcgttagcgatttccgtggtgatgtgacgatcgtcatcggcggcaagcatcgccgcctgaaaacgttccagactggcgcgagctgcggcatcctgttctggggtcagcggataaatcgctgaacgatactgcgtgccgtggtcattgccctgacgcattccctgggcgggatcgtgattctcccaaaatacctgtagcaactgctcatagctgatgacggaaggatcgtaaacaatgcgtaccgcttcggcatgacccgtatcaccggagcacacttcccgataagtcggatttggcgtatagccgccggtatagcctgcggcggtgctgtaaacgccgggtaactgccagaacagacgctccacaccccagaaacaacccatcgcaaaaatggcaatctccattccgtcaggtacattggtcattgagtgaccgttgaccgcatgcagcgtggctacgggcatcggggtgttacgtccaggcagggcatcggcgggggaaaccagatgctttttatcaaataaactcatggtgtcgctctcccgaaaatcggtcattggggttaaggttgtaacaagaggcgtatttgcacacaataaccaccgtgaataggtctaaagtaaaacataagaaatatttggggtttagtctgctttttaatccatattactggatttttgttaagccgtttaacggcgttccaggggcaggaaaaaaggatattcaggagaaaatgtgcgctatatccgacagttatgctgtgtaagcttactctgcttaagcggatctgccgtcgccgcgaacgtccgtctacaggtcgaggggttatcgggacagctggaaaagaacgttcgtgcgcagctttctacgattgaaagtgatgaagtgacgccagaccgtcgctttcgcgcacgcgtcgatgatgccatccgcgaaggtctgaaagcgctgggttattaccagccgaccattgaatttgatctccgtccaccgccaaagaaagggcggcaggtattgatcgccaaagtcacgccaggcgtgccggtgttaattggcggcaccgatgtggtattgcgcggcggcgcgcggaccgataaagactatttgaaattgctcgatactcgcccggctattggcacggtactgaaccagggcgattatgaaaatttcaaaaagtccttaaccagcattgcgttgcgtaaaggttatttcgatagcgaatttaccaaagcgcagctgggcattgcgctcggcctgcataaagccttctgggatattgattataacagtggcgaacgttaccgctttgggcatgtgacctttgaaggatcacaaatccgcgatgaatacctgcaaaatctggtgccgtttaaagagggcgatgagtacgaatcgaaagatctggcagaactgaaccgccgactttctgctaccggctggtttaactcggtggtggtggctccacaatttgataaagcgcgcgaaacgaaagtattaccattgacgggcgtggtttcgccgcgaacagaaaacaccatcgaaaccggggtcggttactctacggacgtgggaccgcgcgtgaaagcgacgtggaaaaagccgtggatgaactcttatggtcacagtctgaccaccagtactagtatttccgcgccggaacagaccctcgacttcagctataaaatgccgctgctgaagaatccactggaacaatattatttggtgcagggcggttttaagcgcactgacctgaacgataccgaatctgactccactacgctggtggcttctcgctactgggatctctccagcggctggcagcgtgccattaacctgcgctggagtctcgaccactttactcagggtgaaattaccaataccacgatgctgttttatcctggggtgatgattagccgcacgcgttctcgtggtggcctgatgccaacctggggcgactcgcaacgctactctatcgactactccaacacggcctggggttcagatgtcgatttctccgttttccaggcgcagaacgtctggatccgcacactgtacgatcgccatcgttttgttacacgcggcacgctgggctggattgaaaccggtgatttcgacaaagtaccgccggatctgcgtttcttcgccgggggcgaccgcagtattcgtggctacaaatacaaatctatcgctccgaaatacgccaacggtgacctgaaaggggcctcgaagttgataaccggatcgctggaataccagtacaacgtgaccggaaaatggtggggcgcggtgtttgtcgatagtggcgaagcggtaagcgatattcgccgcagcgactttaaaaccggtaccggggtcggcgtgcgctgggaatcgccggtcgggccaatcaaactcgattttgccgtaccggtcgcggataaagacgaacacgggttacagttttacatcggtctggggccagaattatgagtttatggaaaaaaatcagcctcggcgtggttatcgttatcttactgttgctgggatcggtggcgtttctggtgggcaccaccagcggcctgcatctggtatttaaagcggcggatcgctgggtgccaggactggatattggcaaggtcaccggcggctggcgcgatctcaccttgtctgacgttcgttatgagcagccaggcgtggcggtaaaagcgggcaatctgcatctggctgtcgggcttgagtgcctgtggaacagcagtgtttgtattaatgatctggcgctgaaagacattcaggtcaacatcgacagtaaaaaaatgcctccttctgaacaggttgaagaagaggaagatagcggtccgctggatctctccacgccgtatcccatcaccctgacacgggtggcactggacaacgtcaacattaagattgatgacaccacggtatcggtgatggacttcacctccggcctgaactggcaggagaaaaccctgaccctgaaaccgacgtcgctgaaaggcctgctgattgctctgccgaaagtggcggaagtggcgcaggaagaagtggtcgaaccgaaaattgaaaatccgcagccggatgaaaagccgctcggcgaaacgctgaaagatctcttttctcgcccggtattgccggaaatgaccgacgtgcatttgccgcttaacctgaacattgaagagtttaagggcgagcagctgcgcgtgacgggcgacacggacatcaccgtgagcaccatgctgctgaaagtgagcagcattgacggcaatactaaactggacgccctggatatcgattccagtcaagggatcgtcaacgccagcggcacggcgcagctgtcagacaactggccggtggacatcactctcaacagtacactgaacgtggagccgttgaaaggtgaaaaagtgaagctgaaaatgggcggcgcgctgcgcgaacagctggagattggcgttaatctttccggtccggtggatatggatttacgcgcccagacgcgactggcggaagccggattgccgctcaacgtggaagtgaacagcaaacagctttactggccgttcactggtgagaagcagtatcaggcggatgatctgaaactgaaacttaccggcaaaatgaccgattacacgctctctatgcgtacggcagtgaagggacaggagatcccgcccgcgactattaccctcgacgccaaaggtaatgaacagcaggtcaatctcgacaaactcaccgtcgcggcgctggaagggaaaactgaactcaaggcgttgctcgactggcaacaggccattagttggcgcggtgagctaacgcttaacggcattaacaccgccaaagagttcccggactggccgtcgaaactcaatggcttgattaaaacccgcggtagcctgtacggcggcacctggcagatggacgtgccggagttgaagctgaccggtaacgttaaacagaacaaagtgaacgttgacggcacgctgaaaggcaacagttatatgcagtggatgatcccagggcttcatctggaactcgggccaaacagtgccgaagtgaaaggcgagctgggggtaaaagatctcaatcttgatgccaccatcaacgcgccggggctggataacgcgctgccggggcttggcggtacagcgaaagggctggtgaaagtacgcggcacggtggaagcgccacaactactggcagatatcaccgcgcgcggcctgcgctggcaggaactttccgtggcgcaggttcgcgtggaaggcgatatcaaatccaccgatcagatcgccgggaaactcgacgtacgcgttgagcaaatttcgcagccggatgtaaatatcaacctcgtcaccctgaatgccaaaggcagcgaaaagcagcacgagctacagttgcggattcagggggagcctgtctccgggcagcttaatctggcaggaagttttgatcgcaaagaagaacgctggaagggaactcttagcaatacccgcttccagacgccggttggcccgtggtcgctgacccgcgatattgcgctggattaccgcaataaggagcaaaaaatcagcatcgggccacactgctggcttaacccgaatgcggaactgtgcgtgccgcaaactatcgatgcgggggccgaagggcgtgcggtggtgaatctcaaccgcttcgacctcgccatgctgaaaccgtttatgccagaaaccactcaggccagcggtatcttcacgggtaaagcggacgttgcctgggacaccacgaaagaggggctgccgcagggcagtatcaccctttcggggcgtaacgtgcaggtaacgcaaaccgtcaacgatgcggcgctgcccgtggcgtttcagacactgaatctgacggcggaattgcgtaacaaccgtgccgaattgggctggaccatccgcctgaccaataacggccagtttgatggacaggtgcaggtgaccgatccgcaaggccgccgtaatcttggtggcaacgtcaatatccgtaacttcaaccttgcgatgataaaccccatctttacccgtggggaaaaagcagcggggatggtgagtgccaacttgcgtctgggtggtgatgtgcaaagcccgcagttgtttggtcagcttcaggttacgggtgtggatatcgatggcaactttatgccgtttgatatgcaaccgagccagcttgcggtcaactttaacggtatgcgctcgacgcttgccggtacagtacggacccagcagggtgaaatctacctgaacggtgatgccgactggagccaaattgaaaactggcgggcgcgggtaacggcgaaaggcagtaaagtgcggatcaccgtgccgccgatggtacgaatggatgtatcgccagatgttgtattcgaggctacaccaaacctgtttaccctcgatggtcgcgtggatgtcccttgggcgcgcatcgtggtgcacgatctgccggaaagcgcagtaggcgtctccagcgatgtggtgatgcttaacgataacctgcaaccggaagagccgaaaacggcgtcgattccgattaacagtaacctgattgtccacgttggcaacaatgtgcgcattgacgcctttggcctgaaagcgcggctgacgggcgatctcaatgtcgttcaggacaaacaagggctgggtctgaacgggcagatcaacatccctgaagggcgcttccatgcctatggtcaggatctgattgtgcgtaaaggtgagttactgttctctggtccgccagatcaaccgtatcttaatattgaagctattcgtaacccggatgctacagaagacgacgtaatcgccggagttcgcgtcactggtctggcggacgaaccgaaagcggagatcttctctgacccggcgatgtcgcaacaagctgccttgtcttatttgctacgtggacaagggctggagagcgatcagagcgacagtgcggcaatgacctcgatgctgattggtttgggggttgcgcaaagtggccagattgtgggtaaaatcggcgagacgtttggcgtaagcaatttagcgctcgacacccagggagtaggcgactcctcccaggtagtggtcagcggctatgtattgccaggtctgcaagtgaaatacggcgtgggtatatttgactctatagcaacactcacgttacgttatcgcctgatgcctaagctatatctggaagccgtgtctggtgtagaccaggcactggatttgctctatcagttcgagttttagcaatgcgaatatttgtctacggcagtttacgccacaaacaaggcaacagtcactggatgaccaatgcccagttactgggcgatttcagtatcgataactaccagttgtatagcctgggccactatccaggcgcagttccggggaacggaacggtacacggtgaagtttatcgtattgacaacgccacgctggccgaacttgatgccttgcgcaccaggggcggtgaatacgcgcgccagttgattcagacgccgtacgggagtgcatggatgtacgtttatcaacgacccgtcgatggattaaagctaattgaaagcggcgactggttagacagggataagtaaccatatgcatacgccaccttcgggtggcgttgttttttgcgagacgactcgcattctgttttgtaattccctcaccttttgcttttctctccgagccgctttccatatctattaacgcataaaaaactctgctggcattcacaaatgcgcaggggtaaaacgtttcctgtagcaccgtgagttatactttgtataacttaaggaggtgcagatgcgtattaccataaaaagatgggggaacagtgcaggtatggtcattcccaatatcgtaatgaaagaacttaacttacagccggggcagagcgtggaggcgcaagtgagcaacaatcaactgattctgacacccatctccaggcgctactcgcttgatgaactgctggcacagtgtgacatgaacgccgcggaacttagcgagcaggatgtctggggtaaatccacccctgcgggtgacgaaatatggtaaagaaaagtgaatttgaacggggagacattgtgctggttggctttgatccagcaagcggccatgaacagcaaggtgctggtcgacctgcgcttgtgctctccgttcaagcctttaatcaactgggaatgacgctggtggcccccattacgcagggcggaaattttgcccgttatgccggatttagcgttcctttacattgcgaagaaggcgatgtgcacggcgtggtgctggtgaatcaggtgcggatgatggatctacacgcccggctggcaaagcgtattggtctggctgcggatgaggtggtggaagaggcgttattacgcttgcaggcggtggtggaataaggtgtgtttatttatcgcgggcataaaaaaacccttactaaccgaagcccggcgttcagggttattacgccagaagaacttatttattctttgcgcgctcgaaggaggcaacgatttcagctttagcggcttctgcgttttcccaaccttcaactttcacccacttgcctttttcgaggtctttgtagtgctcgaagaagtgagcgatttgcgctttcagcagttcaggcagatcgttaacgtctttaatgtgatcgtattctttgctcagcttgctgtgcggaaccgcaaccagtttcgcatcttcaccggcttcgtcggtcattttcagaacgccaaccggacggcaacggatcacagaacccggctgcagcgggtacggagttgggaccagtacgtcaaccgggtcaccgtccagagacagggtgtggttgatgtaaccgtagttgcatggatagaacatcgcggtggacatgaagcggtcaacgaacagtgcgccgctctctttgtcgatttcgtatttgatcggatctgcgttagccgggatctcaataacaacgtagatgtcttccggcagatctttacccgcagggacgttgagtaagctcatgtctgtttcctttaaaaatatgtggcaaacaagtgccgagtattatagccaactcgcgccgaatgtcttcgcttgttttcgtcttcattttcctttttcaccagttttaagacggtatacagagcaggaaaatccataaccgtagccgcatttttcatagtgagatgaaagcgattacaaacttgtgattaacgttttatttacttttttgaagtgtgatgtaacgcaatctgttacataacgaattgtctatagttttttcgcgaacatcttttaaccaataataactaccccgacgaggacaaccctatgtggaaacgcttacttatagtctctgcagtctcggcagccatgtcgtctatggcgttggccgctccattaaccgttggattttcgcaggtcggatcggaatcaggctggcgtgccgcagaaaccaatgtggcgaaaagtgaagccgaaaagcgcggaatcacgttgaaaattgccgatggtcagcaaaagcaggaaaaccagattaaagcggtacgttccttcgttgcacaaggggtggatgcgatctttatcgctccggtggtcgcgacaggttgggaaccggtattaaaagaggcgaaagatgccgaaatcccggtattcttgctcgatcgttccattgatgtgaaagacaaatctctctatatgaccaccgtcactgccgacaacatcctcgaaggcaagttgattggtgactggctggtaaaagaagtgaatggcaaaccatgcaacgtggtggagctgcagggcaccgttggggccagcgtcgccattgaccgtaagaaaggctttgccgaagccattaagaatgcgccaaatatcaaaatcatccgctcgcagtcaggtgacttcacccgcagtaaaggcaaagaagtcatggagagctttatcaaagcggaaaacaacggcaaaaacatctgcatggtttacgcccataacgacgacatggtgattggtgcaattcaggcaattaaagaagcgggcctgaaaccgggcaaagatatcctcacgggttccattgacggtgtaccggacatctacaaagcgatgatggatggcgaagcgaacgccagtgttgaactgacgccgaatatggcaggtcccgccttcgacgcgctggagaaatacaaaaaagacggcaccatgcctgaaaagctgacgttaaccaaatccaccctttacctgcctgataccgcaaaagaagaattagagaagaagaaaaatatggggtattgagggttgctatgcctgatgccgattcgtaggccggataaggcgctcgcgccgcatccggcgatggtgcactgaagcctgatgcgacgcttaccgcgtcttatcatgcctactgggagcacgctttacaccgggggaaaccatgacgaccgaccaacaccaggagatcctccgcaccgaaggattaagtaaatttttccccggcgtcaaagcgttagacaacgttgatttcagcctgcgccgtggcgaaatcatggcgctgctcggtgaaaacggggcgggaaaatcaacgctaatcaaagcattaactggtgtataccacgccgatcgcggcaccatctggctggaaggccaggctatctcaccgaaaaataccgcccacgcgcaacaactcggcattggcaccgtctatcaggaagtcaacctgctacccaatatgtcggtcgctgataatctatttataggccgcgaacccaaacgcttcggccttctacgccgcaaagagatggaaaagcgcgccaccgaactgatggcatcttacggtttctccctcgacgtgcgcgaaccgctcaaccgcttttcagtcgcgatgcagcaaatcgtcgctatttgtcgggctatcgatctctctgccaaagtgctgatcctcgatgaacccaccgccagtctcgacacccaggaagtggagttactgtttgacctgatgcgtcagttgcgcgatcgcggcgtcagcctgatttttgtcactcactttctcgatcaggtctatcaggtcagcgatcggatcaccgtcttacgcaacggcagtttcgtaggctgtcgggaaacgtgcgagctaccgcagatcgaactggtaaaaatgatgctggggcgcgagctggatacccacgcgctacagcgtgccgggcgaacattgttgagcgacaaacccgttgccgcgttcaaaaattacggcaaaaaaggaacgatcgcaccgtttgatctcgaagtacgccccggcgagatcgtcggtctggctggattgctgggatcaggacgtaccgaaaccgccgaagtgatcttcggtatcaaacctgctgacagcggcacggcgttgatcaaaggcaaaccgcaaaacctgcgatcgccacatcaggcttcggtactgggcattggcttctgcccggaagacaggaaaaccgatggcatcatcgctgccgcctcggtgcgggaaaatatcatcctcgctctccaggcccagcgcggctggctacgtcccatttcccgcaaagaacagcaagagattgccgaacgctttatccgccagcttggcattcgcacaccttcaactgaacaaccgattgaatttctctccggcggcaatcagcaaaaagtgttgctttcacgttggctactgacccgaccgcaatttctgatcctcgatgagccaacccgcggcattgatgttggtgcccacgccgagatcatccgcctgattgaaacgctatgcgccgatggtctggcgctgctggtgatctcctccgaactggaagagctggtgggctatgccgatcgggtgattatcatgcgcgatcgcaaacaggtggcggagatcccgctggcagagctttccgttccggcgatcatgaacgccattgcggcgtaaggagaacagtgtgatgcctcaatctcttccggacaccactacgccaaaaaggcgctttcgctggccgacggggatgccgcagctggtagcactattgctggtgctgctggtcgatagcctggtagccccgcatttctggcaggtggtgcttcaggatgggcgtttgttcggtagccccatagacattcttaaccgtgcagctcccgttgcgttactggcgattggcatgacgctggtgatcgccaccggtgggattgatctctccgtaggggcggtgatggctatcgccggagccacaacggctgcgatgacggtcgcgggattcagcctgccgattgttttgttaagcgccctgggcaccggcatcctggcgggattgtggaacggcatactggtagcgatcctcaaaattcagccgtttgtcgccactctgatcctgatggtcgccgggcgcggcgtggcgcaactgatcaccgccgggcagatcgtcacgtttaactcgccggatctctcatggttcggcagtggatcgctgttgttcctgccaacgccggtcattatcgcggtgctgacgcttatcctgttctggctgttgacccgcaaaacggcgctggggatgtttatcgaagccgttggtatcaacattcgggcggcaaaaaatgccggggtaaacacgcgaatcatcgtcatgctcacttatgtgttgagcgggctgtgtgcggcgattgcgggcattatcgtggcggcggatattcgcggtgccgatgccaacaacgctgggttatggctggagctggacgccattctcgcggtggtgattggcggcggatcgctgatgggcgggcgctttaacctgctactttcggtggtgggggcgctgattattcaggggatgaacaccggaattttgctttcgggctttccgccagagatgaaccaggtggtgaaagcggtggtggtgctttgcgtgctgattgttcagtcgcaacgctttatcagtctgattaaaggagtacgtagccgtgataaaacgtaatttgccactgatgatcaccatcggcgtctttgtgttgggttatctttactgcctgacccagtttcccggttttgcttccacaagagtgatctgcaatatcctgaccgataatgcctttcttgggatcattgccgttggcatgacctttgtgatcctctcaggtgggatcgatctctccgtcggttcggtgatcgcctttactggcgtgtttctggcaaaagtgattggcgatttcggcctctcgccgctgctggcgtttccgctagtgctggtgatgggctgtgccttcggcgcatttatggggcttctgatcgacgccctgaagatcccggcatttatcattacgcttgcggggatgttctttttgcgcggcgtcagctatctcgtttcggaagagtcgattccgataaaccatcccatttatgacacgctctcaagccttgcgtggaaaatccctggcggcggtcgcttaagtgcgatgggactgctgatgttggcggtggtggttatcggcatattcctcgcgcatcgtacccgttttggtaatcaggtatacgccattggcggcaacgcaacgtcggcgaatctgatggggatttccactcgcagcaccactattcgcatttatatgctctccaccggactggcaacgctggcggggattgtcttctcgatttatacccaggccggatatgcgctggcgggcgtaggtgtggaactggatgctatcgcctcagtggtaattggcggtacgcttttgagcggtggcgttggaacggtattagggacgctttttggcgtggcgattcagggactgattcagacttacataaactttgatggcacgctgagttcctggtggacgaaaatcgccatcggtattttgttgtttatttttatagcattacagcgtggattaacggtgctgtgggagaatcgtcagagttcgccagtgacaagagtcaacattgcgcagcaataaaaacgcctctccgtgtggagaggcgcaggagattacgcgtccgggaactcacggataaagcgttcgacatcttcaaccatatggtcgttgccgacaaagaatgaacggcgctggtgcagggtttccgggatgatatccagaatacgctctttgccatcgctcgctttaccgcccgcttgttccgccaggaatgccatcgggttgcactcatacagcaaacgcagtttgccgtccgggtggctggcggtgcttgggtagagataaataccgcctttcagcaggttacggtggaaatccgcgaccagtgaaccgatataacgtgaggtataagggcggttggtggatttatcttcttcctggcagaatttaatgtacttcttcaccccgttcggaaacttaatgtagtttccttcgttgatggagtaggttttgcctttctccgggaagcgcatccgttcctggcacaggcagaaaacgccgagcgaaggatcgtaagtaaaggcgtgaacaccgcatccggtggtgtaaaccagcatggtagaggagccgtataccacgtaacctgccgcaacctgtttgttaccaggctggaggaaatcttcttccgttaccggcgtgccaacaggcgtaacgcggcggtagatggagaaaatggtaccgacagagacgttaacatcgatgttggacgagccatccagggggtccatcagcaccacgtattttgcgtgttcacagccttcaaagacgacaatctcatcttcttcttcagaggcaatgcccgcaacgatatcgcgtgctttcagtgcggctttcagtttttcattagcgaacaagtcgagtttctgctgaacctcgccctgcacgttctcagcaccgctggcacccaggatatcaaccagtcctgctttgttgatatcgcgatggataatcttggcgcccagttttattgccgacagcaaagcagtgagctcaccggtagcatgagaaaactcgtgctgcttttcgacaataaattcacctaacgttttcataaaactttccctgcaatgtttatggagtaaagcgaccgcaacaatcttaacaaataatctcaatgttgcgctcaggtgaatcgcgccagcaaattacggattatcctgaaatgcgtttctcacttgcccgacatatgcgtaaaatgagcggcagattaaaaaaggatagtgacgtatgcgcattcatattttaggaatttgtggcacatttatgggcggtctggcgatgctggcgcgccagttaggccatgaagtaacgggttcggacgccaatgtgtatccgccgatgagcaccttacttgagaagcaaggcattgagctgattcaggggtacgatgccagccagctcgagccgcagccggatctggtgattattggcaacgccatgacccgtggaaatccgtgtgtggaagcggtactggaaaaaaatatcccttatatgtcaggtccacagtggctgcacgattttgtgctgcgcgaccgctgggtgctggccgttgccggtacacacggcaaaaccaccaccgcgggaatggcgacctggattctggaacagtgtggttacaaaccgggctttgtaatcggcggtgtgccggggaactttgaggtttcggctcatctgggcgaaagcgacttctttgttatcgaagcggatgagtatgactgcgccttcttcgacaaacgctctaaatttgttcattactgcccgcgtacgctgatcctcaacaaccttgagttcgatcacgccgatatctttgacgacctgaaagcgatccagaaacagttccaccatctggtgcgtatcgttccggggcagggccgtattatctggccggaaaatgacatcaacctgaaacagaccatggcgatgggctgctggagcgagcaggagctggtgggtgagcagggtcactggcaggcgaaaaagctgaccaccgatgcttccgaatgggaagttttgctggatggcgaaaaagtgggcgaagtgaaatggtcgctggtaggcgaacataatatgcacaatggcctgatggcgattgcagcggctcgccatgttggtgtagcgccggcagatgccgctaacgcgctgggttcgtttattaatgctcgtcgccgtctggagttgcgtggtgaagcgaatggcgtcacggtatatgacgattttgcccatcacccgacggcgattctggcaacgctggcggcgctgcgtggcaaagttggtggtacggcgcgcattattgctgtgctggagccgcgctcgaataccatgaaaatggggatctgcaaagacgatctggcaccttcattaggtcgtgccgatgaagtcttcctgctgcaaccggcgcatattccgtggcaggtggcagaagtggcagaagcctgcgttcagcctgcacactggagtggcgatgtggatacgctggcagatatggtggtgaaaaccgctcagcctggcgaccatattctggtgatgagcaacggcggttttggtgggatccatcagaaactgctggatgggctggcgaagaaggcggaagccgcgcagtaattcggccttagccagatatagtatgcgtaggccggataaggcgttcacgccgcatccggcatttgagcatagtgcctgatgcgacgcttgatgcgtcttatcaggcctacaggtgcaccgtatccggcaaaccatactcacatcaacaacgaaaattacccttcgttctccgctaactcgcgcagatactggaaaatctggcgtgcggatttcggcggcttattcccttctttctctttcttcgcgttgcggatcagagtacgcagttgctgacgatcggcatcgggccacagatttaatacctcagcgatggcgtcatcaccttgatcgatcagacgatcgcgcaggttttccagtttatggaacagcaccacctgctggttgtgacggtttttcagcttatccagcgcctgacgaataggctctacgtcgcgctggcgcagcatcttaccgatgagctgcaactggcggcggcgaccttccatcttaatacgctgggcgagctcaatagccgcgcgcagatccgcatctaacgggatcttatccagcgcgtttttccccagatcaacaatttccgcgccaaggcgttttagctcctcggcatcacgtttaatttcacttttactgacccagataatttcatcgtcttcgtcttcgatgtcatcaccgggaacgtcgtcgagccagtcttcgggctgcttagtcatctcaggctccttaaaaaaagaggctaatgttaccagttaagatgcgcactgaaaaacggttctctgttagacttcagagaaactctctacattatggcacttgcaatgaaagtaatctctcaagttgaagcgcagcgcaagattctggaagaagcagtttccactgcgctggagttggcctcaggcaaatcggacggtgcggaagttgccgtcagcaagaccaccggcattagcgtaagcacgcgttatggtgaagtggagaatgttgaattcaatagcgatggcgcgctggggatcactgtttatcaccagaaccgcaaaggtagcgcatcatccaccgatttaagcccgcaggccattgcccgtactgtacaggcggcgctggatattgcccgttatacctcgccagatccctgtgccggcgtggcagacaaagagctgctggcctttgacgcaccagatctcgacttgttccaccctgcggaagtttccccggatgaagccattgaactggcggcccgcgcagaacaggcggcattgcaggcggacaaacgcatcaccaataccgaaggtggcagctttaacagccactacggtgtcaaagtttttggcaacagccacggcatgttgcagggttactgctcaacgcgtcattcgctctccagctgtgtaattgccgaagaaaatggcgatatggagcgtgattacgcctacaccattggtcgtgcgatgagcgatctgcaaacgccagagtgggttggggccgactgtgctcgccgtactttatcgcgtctgtcaccgcgtaaactctccaccatgaaagcgccagtcatttttgccaatgaagtggcaaccgggctttttgggcatctggtgggggcgatagcgggtggatcggtttatcgtaaatctaccttcctgctggattcgctgggtaaacaaattctgccggactggctgaccattgaagagcatccgcatctgctgaaagggctggcgtcgacgccattcgacagcgaaggtgtgcgcaccgagcgtcgcgatattattaaagatggcatcctgactcagtggctgctgaccagctactcggcgcggaaactggggctgaaaagcaccggacatgcgggcggtattcacaactggcggattgccggacaaggtctaagcttcgagcagatgctcaaagagatgggcaccgggctggtggtgacggaattgatgggccagggcgtgagtgccattaccggtgattattcccgtggtgcagcgggcttctgggtagagaatggcgaaattcagtatccggtgagcgaaatcaccatcgcaggtaatttaaaagatatgtggcgcaatattgtcaccgtcggtaacgatattgaaacacgcagtaatatacagtgtggttctgtgctgttgccggagatgaaaatcgccggacagtaaaaaaactggcgcgacctgccgcgctataaactaaaaaattacacaaaatcattcgcactgcatcgagacggaaagtgaatgagggccggggagcgtactcgcagtacgtgacccggtcgaatgagcgtagtcgtcgatgaggcagtgtgaaggatgaagtgtaaataaaaaaggaactattcttgcagtctcctcgttggtattcagttcggcgtcatttgctgctgatctcgaagacaatatggaaaccctcaacgacaatttaaaagtggtcgaaaaagccgataacgcggcgcaagtcaaagacgcgttaacgaagatgcgcgccgcagcgctggatgcgcaaaaagcaacgccgccgaagctcgaagataaatcaccggacagcccggaaatgaaagatttccgccacggtttcgacattctggtcggtcagattgacgacgcgctgaagctggcaaatgaaggtaaagtaaaagaagcgcaggctgctgcagagcaactgaaaacgacccgcaattcatatcacaagaagtatcgttaattcctcatttccctgttgcctgcactcaggtaacagggaacttatcatcgcaaatgatgcaccacctgattgctgctgccgcgccagatcagggaagggtcttttaaatcctgcacaaatttgccgtcgaccagcacgttaatcaaatcaacaacctgcatttgcgcagcgttgagttcgtcgagtttatagcctgtccacacccagatgtctttacccggacactcggcgcggatgcgttgtaccagtttcagaatatccggcacgttttgcggatgcagcggatcgccgccggagagggaaataccctggcgtttgatacgagtgtcattcagatcgttaatgatctggtcttccattgctttggtaaatggctgaccggaatttacccgccatgtgcttttgttatagcaaccggggcattcatgaacacacccggagacaaacagggtgcaacgagtgccggggccgttgacgatgtcgacaggatagtactgatgataattcattatttcgcctggcttatcagtccgcgtgtaggctgcatccggtaatcaatgcctgatgcgacgctgtcgcgtcttatcagacctggagcaattgccaaatgtaggccggataaggcgtttacgccgcatccggcatttgcttagctcagagtgaagattaacctatctgcccattccccaaatgtttaacgcggcgcttaacttcttcctgcttaccagcgttaaacggacgtgcatccgggctacctaaatatccgcacacgcggcgagttaccgacacacgggaggcgtcatggttaccacatttcgggcaagtgaagcctttgctggtgcactcgaactcaccggtaaagccacactcgtagcactcatcaatcggtgtattggtgccgtaatacggtacatgctgatagctgtaatcccagacatcttccagcgccttcaggttgtgctgaatgtttggatactcgccgtagcaaatgaaaccaccgttcgccagcggcgggtaaggcgcttcaaagtcgatcttgtcgtacgggttcaccttcttctccacatcgaggtggaaactgttggtgtagtaacctttatcggtcacgcccggcaccacgccaaactcagcagtatcgagacggcagaagcgatcgcacaggttttcactcggcgtgctgtagagactgaaaccataacccgtttcttctttccactgatccactgcctgacgcagacgttcaacaatggcgatacctttcgcgcgaagctgctcgttgtcgtaaacatgctcgccgccgaacagcgcgttaatggtttcgtggatgccgatgtaacccagcgaaatagacgcacgaccgtttttgaagatttcagaaacatcatcgtcagcattgagacgcacgccacaagcaccttccatatagaggatcggggccacgcgcgctttcacgccttcgagacgagcgatacgggtcatcagcgccttacgtgccagcaccagacgttcatccagcagcttccagaaggtggcttcatcgccttttgcttccagagcaatacgcggcaggttcaggctgatcacgccgaggttgttacgaccatcgtggatctgctcgccgttttcattttcccacacgccgaggaagctgcggcagcccatcggagttttaaacgaaccggtgactttcactacctgatcgtagttcaggatatccggatacatgcgcttgcttgcgcactccagcgccagctgtttgatgtcgtagttcggatcgccttttttatggttcaggccatcgcgaatcgcaaacaccagtttcgggaacaccgcagttttacggtttttaccgaggcctgcgatacggttacgcaggatcgattcctgaatcaggcgcgattcccagctggtgcccaggccaaaaccaaaggttacaaacggcgtctgaccgttggcggtgtgcagggtgtttacttcgtactccagtgactggaaggcatcgtagcactctttgatggttcgagagttagcgtagccttcggcgtccgggatgttccactcttctgcggtcttgcgatgtttgttgtagctggcagtgacaaacggtgccagcacttcatcgatacggttaatggtggtgccgccataaatatggctggcaacctgagcaataatctgcgcagttaccgcggttgccgtagagatcgacttcggcggttcaatctcggcgttccccattttaaagccctgggtcagcatgcctttcaggtcgatcaacatgcagttgaacatcgggaagaacggtgagtaatcgagatcgtgatagtgaatatcgccacgctcatgtgcctgcaccacgtcacgcggcagcaggtgctgacgtgcatagtgtttagccacgatcccggccagcaggtcgcgctgggttggaatcaccttgctgtctttgttggcgttttcgttgagtaacgaggcgttggtctgctcgaccagaccacggatctcctggttcaggcgaccgcgtttttcacgttcaatgtcgcgatcgtgacggtactcgatgtaagcacgagccagttgtttgtatggacctgacatcagctgattttcaactgcggtctggatctcattgatatccacctggttgcggccctgcatctgctcgctgacaaccgcggcaacagtggcgcaataatcggcatcatcgacttccgctgctttagctgcacgcagaatcgcttctttgatgcgctctgatttaaacggcactttgcagccgtctcgtttcatcacatgcggtgtcatgatcgctccatatttttaagaacaggttatccacagaaattgggaaaggcgttttccggttttttcgtttcgttttccggtgctttccgcaatcgccatccgcttatccacaacgccgcacctttttcgtggggagctgtagtagcaattatagtcgattaatacaacatattgggttgggacgcattttaaagtctatatatagtgctttgcatcaaggatgtttgagctttttttgatgtagctcaaagtaaaaagcagagcgtacggatgacgggcgctacagcgatatgtaaattttttaatgaatttgctggttgaaaaatcaacaaaaacaacatactgacagacaaaaccccggaatgaccggcattaccggggcttagggaagatttacttctgtaaccaccagacagcctcaaaaggccgtaaattcatggcacagggttgtggtgaggcttcttcgtagttatgcatcacaagctgccagttgccgcgcatttgccctgcctgccagggttggatctcacggctaaggttggcaatgaccagcaaggtttgccccttccattcacggcgatagcaccacaatacagggctgtttggcagcagatcctggtaattgccccatgtcaggatggcttcctgcttacgcagtgcgattaacttttggtaggtgtaaaacaccgaggaatcatcggccagcgcggcttctacgttgatttgttgatagttatcgcccaggccaatccacggttcgccagccgtaaacccggcattatcgccgttgctccattgcatgggcgtgcgactgttgtcacgggatttactggcgaggattgccaataactcgtcggcatcacgcccatcgttgcgcagctcggcaaacatattgaggctctctacgtcgcgatagtcagtaatgcgcgtgaaatgcgggttggtcatgccaatctcttcgccctggtagatatacggcgttccctgcatgccatgcagcaccatcgccagcatttttgccgcaggcacgcggtattcaccttcatcaccaaagcgagaaacaatgcgcggctgatcgtggttacaccagaacaaggcattccatgctacgttgtgcattccttgttgccagtggcggaacaatgttttcaacgccacaaagtcaggtttagccagcgtccatttttcaccaccgggataatcgaccttcaggtgatgaaaattaaaggtcatcgacaattcactgcctgtcagagccgcgtatcgctggcaatgctcaaggctggtggaggacatttcacctacggtcattaacccgcgtggcgtaaacacatcgcggttcatctcgtgcaaaaactcgtgtgctcgtggcccgtcggtgtagaagcgacgcccgtcgccgtccaggtcttcagggaaacgcgggtctttggagatcagattcaccacatccaggcgcaacccgtcgaccccacgatcggcccagaactcacagacttttttcagctctgcgcgtaccgctggattctcccagttgagatccgcctgttctggtgcaaagagatgcaaatagtactgttcgctttccgcatgccagcgccacgcactaccgccaaattttgaacgccagttgttcggtggcgtttctggttctccatcgcgccagatataaaactggcggtaagggctttctttgttcagcgcctcgcgaaaccaggcatgttgggtagaggtatggttaaacaccatatcgagaatgatacgaatcccgcgcgattttgcctgcgtcaccagttcgtcaaaatcgtccagcgtgccgtaggtgggatcaatcgccgtatagttcgctacgtcgtaaccgttatcgacctggggagagacataaaagggggttagccagatggcatcaacgcccagtttatgcagatagtccaggtgttggataacgccacgtaaatcgccggtaccgctacccgtggtgtcctgaaaactctttggataaatctggtagataacgccgttttgccaccagtggggaagatgagtcattacgttattcctgcgaatgcgagggggcgcaattgcgccccgaagaaaattaaacaatgtccagcgtgcccaggcggtatttccgctgatagataaacgaggtgagtacaatcgggatgatgatggcgatagccattgccagcgcaaacacctgccagtagctcggttgaatcgagagaattcccggcaggccgcctacgccgatgccattcgccataacgccgttcaggccgcatagcaatcctgccagaccagaaccaatcatcgcgcacagcatcgggaagcgatatttcaggttgatgccgtacattgcaggctcagtgaccccaagccaggcggagatagcggcaggcacggagatctcgcgttcattgtgcttgcggctggaaatgataatgcctatcacggcggagccctgagcgatattcgacagcgcaatcagcggccacactggcgtaccacccatgctttgaatcatctgcaaatcaatagcaagcgtggtctggtgtacaccggtgatcaccagcggggcgtacaggaagccaaacaatgctgcgccaatcggagcaaagctgccggtcatcaggtgacgtaccgcaaaggcaacgccatcgccaatcatgcgaccaaacggaccaatcagcgcatgggcgaggaacaccgcgaggatcagcgaacagacgggtaccaccaccagatagaggtaatccggcacgatgcgtttaaggcgagtttcaataacgcccagcgccagtccggctaacagtgccgggatcacctgcgcctgatagcctactttggcgatgctgaacatgccaaagtcccacacttccggcagctgctgcccgagcagataagcgttcatcagctgtggagaaaccagtgtcacgccaagcacgataccaaggatcggcgtgccgcccatttttttcaccgctgaccagcaaataccgaccggcaggtagaagaagatcgcttcaccgatcaaccacagaaaatcgtagatcgtttgcagggaagggtacatttgcgccagcgtctgaccgttgctcatgggcaaatcgccgatcacattgcgaaaaccgaggatcaaaccgccgctaatcaacgcgggcagcaacgggaagaagatcaccgcgaaatgagagatcaactgctcatgccatttcatattatgccgggcggctttttttacctgctctttatcaacctgcgcctgtccggttgacgcaatcagtgcttgatagtaatcacccacgttggtgccaatcaccacctgaaattgcccggcattggtgaaacagcctttcaccatagggagttgctcaatttctttcggtctggcattggccggttggttgaggacaaagcgtaggcgagtaatacagtggctcaccgtcgcaatattgccgcgcccgccgaccagttcaatcaaccgatcgatatccgtttggtttattttgctcatcataaagccccatggcagatgacatttttggttggctgcagaatatattgcgcggaaaaatttaaaaacgggaacgttcccgaaacgcagcgaagatcacaatttatcgttcaggaaacgatcaggacagggtggcggggatgatgatttgttgcggttcgctgcgcccggttacctgcgcgatcaactggcaagccgcctggcgtccagcttcggcgtaaccgggatctacggttacgatctccggatggaggaatttcattaacggcgtattaccgacgctcgccagttgcaaggtgtcgatgcgttgctcttgcaggtatttacttgcgccaagtgccagcgtgtcggttgcgcacagtaaggcggtagtttcaggcgtaatcacttttgcaacgttctcatagccttgcttcatagcaagccctggcagggcggcaacgggatgcagtttatgcgctttgcagaacgccaggtaggcttcgtgacgtcgcttaccggttgtcacgtcactgtgcggcacgccgagataactgatattacgatgcccctggtcatacagccgttgcatcaggattttgattgccccttcgtcgtcataacagaccgaagcaaagccttttgcgtcacgcgccagcagaaccagcgatgactgccagtgggctaacatttcttctgttatgccagtaaaaccgaacagcactacgccgtcgatattacgccgtttcagcactcccaaatgttcggcaactaattgcggggaaaactgactttccatcatgattgggtcgtaaccttgttcatagaacgctggcagcatggtttgaacggcgagattttctgacaacgaatccagacgggtaacaatgatggcgaccactttatcgctttgcccacgcatagcgcgcgcagagcgggaaggggaaaatccatgctgattcatcactgcttcaacacgctcgcgggtgagctggctcacgccgctttcgttattcagcacccgggaaactgtagatttccccacgccgcttaagcgcgcgatatctttgatggtcagccgattttgcatcctgttgtcctgtaacgtgttgtttaattatttgagcctaacgttacccgtgcattcagcaatgggtaaagtctggtttatcgttggtttagttgtcagcaggtattatatcgccatagatgctacgaatattattggattctccttattatttgcggcgcttttttcacttaccggaggttatatggaacctgatcccacgcctctccctcgacggagattaaaacttttccggtaagcccgtcttttcacggcgttaccggatgcgtaaggccgtgacgttttaacgtccctgctcagctttattaccttcaggtaaggcttcgccacgcctgaagacatttctgtactgtttcagacagtgcggagggactccttatgtttaaagaaatttttacccggctcattcgccatttaccttcccgtctggttcatcgtgatccattgcctggcgcgcagcagacagtgaatacggtggtcccgccgtccttaagtgcgcattgcctgaaaatggcggtgatgcccgaagaagaattgtggaaaacgttcgacacccatccggaagggttaaatcaggcggaagtggaatctgcccgcgaacaacatggtgaaaataaattacccgcacaacaaccgtcgccgtggtgggtacatttatgggtctgctatcgcaacccctttaatattttactcaccattctcggcgctatttcttacgccacggaagatttatttgctgcgggcgttatcgcgctaatggtcgctatttctacgttgctgaactttattcaggaagcacgttccactaaagcggcagatgccctgaaagcgatggtcagcaatactgcgacggtgctgcgcgtaattaacgacaaaggcgaaaatggctggctggagatcccgatcgaccagctggtgcccggcgatattataaaactggcggcgggagatatgatcccggcagatttacgtatcttgcaggcgcgggatctgttcgtcgctcaggcgtcgttaaccggtgagtctctgcccgtagaaaaagccgctaccactcgccagccggagcacagcaatccgctggagtgcgacacgctgtgttttatgggcaccaccgtggtgagcggcacggcacaagcaatggtgattgctacaggtgccaatacctggtttggtcaactggcggggcgtgttagtgagcaggaaagcgagccgaatgcctttcagcaagggatcagccgcgtcagtatgctgctgattcgctttatgctggtgatggcaccggtggtgctgttaatcaatggttacaccaaaggcgactggtgggaagcggcgctgtttgcgctttcggtcgcggtaggcctaacgccggaaatgttgccgatgattgttacctcgacgctggcgcgcggcgcagtaaagctgtcgaaacagaaagtgatcgtcaaacatctggatgctattcagaactttggcgcaatggatattctgtgcactgataaaaccggcaccctgacgcaggataaaattgtgctggagaatcataccgatatctccggtaaaaccagcgaacgcgtgctgcatagcgcgtggttgaacagtcattatcagaccggacttaaaaacctgctcgatacagcggtgctcgaaggtacggatgaagagtcagcgcgctcgctggccagtcgttggcaaaaaattgatgagattccgtttgatttcgagcgtcgccggatgtcggtggtagtggcagaaaataccgagcaccatcagctggtttgcaaaggtgcattgcaggaaatcctcaatgtgtgttcgcaggtgcgtcacaatggcgagattgtgccgctcgatgacatcatgctgcgtaagattaagcgggttactgatacgctgaatcgtcaggggctgcgcgtggttgcggtggcgacgaaatacctgccagcgcgtgaaggagattaccagcgggcggatgaatccgacctgatcctcgaaggatatattgcttttcttgatccgccaaaagagacaaccgctccggcactgaaggcattaaaagcgagtggaattaccgtaaaaatccttactggcgacagtgagttagttgcagcgaaagtgtgccatgaagtggggctggacgcgggagaggtggtcattggtagtgatattgaaacgctatctgacgacgaactggcaaatcttgcacagcgtaccacgctgtttgcccgcctgacgccgatgcataaagaacgcattgtgaccttactgaagcgcgaagggcatgtggttggctttatgggcgatggtattaatgatgcgcccgccttacgcgctgcggatatcggcatttctgtggacggcgcggtagatattgcccgtgaagcggctgatatcatcctgctggaaaaaagcctgatggtgctggaagagggggttattgagggacgtcgcactttcgccaacatgctgaaatacatcaaaatgacggcgagctctaacttcggtaatgtgttcagcgtgctggtagcgagtgctttcttgcccttcctgccgatgttgccgttacacttgcttattcagaacctgctgtacgatgtgtcacaggtggcgatcccgtttgataacgtcgacgacgagcaaattcaaaagccgcagcgttggaatccggcggatctggggcgctttatgatcttcttcggaccgatcagctcgatcttcgatattttgacgttttgcctgatgtggtgggtattccatgccaacacgccggaaacgcaaacgctgttccagtcgggatggtttgtggtgggcttactgtcgcaaacgctgattgtgcatatgatccgcacccgccgtgtgccgtttattcagagctgtgcatcgtggccgttaatgatcatgaccgtgatcgtgatgattgtcgggatcgcattgccgttttcaccgctggccagttatctgcaattacaggcgctgccgttaagctatttcccgtggctggttgcgattctggcagggtatatgacattaacccagttggtgaaagggttctatagccgtcgttacggctggcaataaagaataaactgggcacgatagccccgattcagattgtagacaaagtgagttttgttcatgccggatgcggcgtaaatgccttatccggccaacaaattcaataaattgcaggaatcacgtaggcctgataagcgtagcgcatcaggcgattttgcgtttgtcatcagacttaatccgggcatgatagcccggatttccatcaagattagcgacgaacagcgatcgcttcgatctcaatcttcacgtctttcggcagacgggcaacttcaacgcaagaacgtgccgggaaggtggcgttgtgttcggtgaagaaggcttcgtaagtggcgtttacggttgcgaagtcgttcagatcttttacaaacacggtagttttaacgatgtcgcccactttcaggccagcggcttcgacgatcgcttttacgttatccagcgactgacgtgcctgtgcagcgacgtctgccggtacttcgcccgttttcggatttaccgggatctgaccggaggtgatgatcatattgcccagatcaacgccctgtacgtaaggaccgatagctgccggtgcattttccgtcgcgatagttttgctcatgatttctcctttattacagcggtaaaaagtctggctcattatagggagccagacttttattaccaaccgcaattaattggccagcaccacattatgggaaaactctttttcacagtatttgcatttgagcgcgatatcattggcgcgttttcgcacggcaaagctggatgaaaccggttcggcatggctgatacagttgctgttcgggcagaccagcacattgtcgatgcgctccggcagacttgggcgcgatttacccaccacttcatagttgtcgatacggttaaccgtggcttgcggcgcatacaatgccagttgatctacttgatcttcactcaaaaaggtattttcgattttgatcagatctttgcggcccatctcgccagaaggcaggttcagaccaatggtgatgcgctgatccgtttcggtcagcttgaacagactcaacagcttaaaaccgatctgggcggggatatggtcaattaccgtgccgcgtttaatagcttcaacctgcaatttattatcgtgtgtcatctctatttccccttacagtaccagatcgcgattcagaaccagtgccagtaacgcctggcgagcgaaaatcccgttgcctgcctgctggaagtaccaggcgtgtggcgttttatcaacatccgtcgcaatctcatcaacacgcggcagcggatgcagcactttcatattggctttggcgttgtggagatcgctggcgcgaagaacaaactgcgctttcacgttggcgtactcggacgggtccagacgctctttttgcacgcgggtcatgtacaggatgtctacttccgccatcacttcttcaatagagctgtgcagactccatgcgatccctttttcatcgagcatatccagaatgtattgcggcattgccagcgcgtccggcgcgatgaagtaaaaacggttgccgtcgaacttcgctaacgcctgagtcagggagtgaacggtgcggccatatttcaggtcaccaaccattgcgacgtggagattgtccagacgcccctgggtttcctgaatagtgaataagtccagcaaggtttgcgtcggatgttggttggagccatcaccggcattcagtaccggtacattgccggaaaactcggtggccaggcgcgccgcaccttcctgcggatgacgcatcactatcgcatcgacgtaagtgctgataaccgaaatggtatcggccagcgtttcgccctttttacccagtgatgtattggcgctgtcggagaagcccaccacgctggcccccaggcggtgcatagatgtttcgaaagagaggcgggtacgggtagaggcttcgaagaaacagctggcaatgactttgtgcttcaacagctctggttgcgggtttgctttcagtttcgccgctgtcgccagcaccagattaaggtcatcgcgactaaggtcgtttatggaaatgatatgtttctgatatagcggattagccatcttttatctcctgacgcctgggcaaaaaaaagcccctcgattgaggggctgggaatgggtgatcaacgggaagaaaaacggcaggccagcgtcttttttcagacgcggtaagacaaaatgtcgaacacactgaaccatacatcctcccggcaaattgtccggcattatactcatcgtcagaagcggcgcaagcatttgatgcaatattttgtcagcgcaaacggtttatttgaattaaaagtcaaggtatatgcatttttatttgatgtgattctgcaggggaactgtccttcggtatcaataattgcagacattccctgctttttcctttttcactttcacgcaatcagatatgcattttattccattcatccgacttatagggcggagtgtgaaagcgaacggctaacactattgcttactgctcagggatgcgcgctatcactttaatttcaaaatcaaagcctgccagccatgtaacacccaccgccgtccagtttggataaggtggggcgctaaatatttcatttttcaccgtcatgatgtcttcaaattggttttctggatcggtatggaagctcgtaacatcaatgatatcgtcaaaagtgcatcccgcagctgccagggtcgcatgcaaattatcaaatgccagtctgacttgttgctgaaaatcgggttctggtgttccgtcctctcgacttcctacttgcccggaaacaaacagcaaatcgccggaacgaatagccgcagaataacgatgctcagcatatagtgaatgtcggccagcagggaaaacagcggttctttctaccatttggttatcctcaagatttacgacatgaacagaagatttctctttaccgggagccgcttttagcggacgacgtgagtaaacaaaacccagacatcatggataatggctgggcttaattgagcgtagtcggttatgcgccaaacgcgccatcaatggtatgcatcgcgccggtaacaaaactggcttctggccctgctaaccatgcgaccataccagcgacctcttccggttgcccatgtcttttgatagccatcaaactatgcaacatatcgcgcattggcccgttggcgggattagcgtcggtatcaattggccctggctggacgacgttaatggtgatcccacgcggtccaaaatcacgggccagcccgcgcgccatgccttgcagggcagatttgctggcggcataagcagccatgcctgcaacaggcatacgatcgccattcacggagccgatgattaagatgcgcccgccttcgggcatctgccgggcggcttcaacagaggcatgataaggagcatgaatattgattttgaaaaggcgatcaatatcgtcggcatttaattccagggcctcgccaaagacgccaatacctgcatttaccaccaggatatccaatgcgccgctcttacgaacgacatcaatgacagcgtctctgtcagcactatctgtgaatactgctgtcgctccagtctcttgtgccaggcgtttagcggcatctttcgaccccgcataggtgaatcgtacattggccccatcggtgacgaaacgacgtacgatagcggcaccgataccacgactgccaccgaggatgagaactgtcttacctgtaaaagcgcccataaggactccttgatttattatgtaacatgcattacaaaactgttttaactttctgtcaacaggttttgtaatggtcactaaaaaacaatctcgcgttccaggtcgtcccagacgtttcgctcctgagcaggcaatctctgcggcaaaagtgctttttcaccaaaaaggtttcgatgctgtcagtgttgctgaagttactgattatcttggtattaaccccccgagcctctacgcggcttttggcagtaaagctgggttatttagccgtgtactcaatgaatacgtcggtacggaagctattccgcttgccgatattcttcgtgatgatcgtccggtaggcgagtgcctggttgaggtattaaaagaagcggcgcgcagatatagccaaaacggcggctgcgctggctgtatggttcttgaaggtattcatagtcatgatccacaagcgcgtgatattgccgttcaatattatcacgccgcagaaacgaccatttatgactacatcgccaggcggcatccacaacgcgcacaatgtgtgactgattttatgagtaccgtgatgtctgggctttctgcgaaggcacgagaggggcactctatagaacaactctgtgcaacagctgcaatggcgggggaagcgataaaaactattcttgaggagtgatgcgggccttgacccgaaaggcgggaaagcgcctgccgataagttgtgataagacaataattcacgcgttaaggctagcggaattgattatcttttcgtataacgatagaaatgaaacgttgttttaattaaggagtggaaaagatgatcatcggaaatattcataatcttcagccgtggctaccccaggagttacgccaggcgattgagcatatcaaagcacacgttacggcagaaacgccaaagggcaagcacgatatcgaaggcaatcgactgttttatcttatctcggaagatatgaccgagccgtacgaagctcgccgtgcggagtaccatgcccgctatcttgacattcagattgtgttaaaaggtcaggaaggcatgaccttcagcacgcaacctgcaggcgcgccggataccgactggttagctgataaagacatcgcatttttgccggaaggcgttgatgagaaaacagttattctaaatgaaggtgattttgttgtgttttatccgggggaagtgcataaaccgctgtgcgcagtgggcgcgccagcccaggttcgcaaagcagtagtgaagatgctgatggcgtgatgacttttcgccgtaaataactcaaggtttacggcgagtttgtgaaaagagcgttttttgatatttttttgtgagtaaaatttgtaatgcttagacgttcttattcactcaaggagttcgtcatgagcaaaatatcagatttaaattattctcaacacattacattagccgacaattttaaacaaaaaagtgaagttttaaatacctggcgtgttggaatgaatgattttgcccgtattgccggggggcaggataacagaaggaatattctttctcctggagcatttttagagtttttggcaaagatatttaccctgggttatgtggattttagcaaacgctccaacgaagcgggtagaaatatgatggctcatattaagtcctcatcttattctaaagatactaatggcaatgaaaaaatgaagttttacatgaataatcctgtaggggaacgagcggattcacccaaggtgattatagaaatttcactttccactatcactactatggggactcgtcaaggacatacagccattatatttccacaacctgatggttcgactaaccgttatgaagggaagtcctttgaaagaaaagatgagagttcattacacctgattactaacaaggttctggcgtgttaccaaagtgaagctaacaagaaaatagcgcgtctattaaataataatcaggagttaaataatctacagaaattaaataatctacagaagttaaataatctactgaagttaaataatatacaggggttaaataatcctcaggagttaaataatccgcagaatttaaatgattctcaggagttaaataactcgcaggaattaaatagtccacaggagttaaatgatccgcaggagttaaataattctcaggacttaaataactctaaggtgagttgtacagtttcagttgattctacgattacgggtttattaaaagaaccattgaataatgcattattagcaataaggaacgaacatctgctattaatgcctcatgtatgtgatgaatcgatttcatacttactgggcgaaaaaggtatacttgaagaaatagataagctctacgcattaaatgatcacggaattgataatgacaaagtaggtaacaatgaaattaatgacatcaaagttaacctgtctcatattcttattgattccttagatgatgcaaaggttaaccttacaccggtcatcgattcgattctggagactttttcaaaatccccatatattaatgatgtaagaatactggattggtgttttaataaaagcatgcaatattttgatgatactaaaaagataaagcatgcatgctccgtaataaatcatattaatcttcgcagcgatcagtctaaaatagctgagacattatttttcaatctcgataaagaaccctataaaaatagccctgaattacaggggttgatttggaataagttggttgtatatgtcaatgaatttaacttaagtaatcgagaaaaaacaaatttaatacaaaggctatttgataatgttgagtctatatttaatgaagtacctgtcagcattttagtgaatgatatttttatgaatgatttctttatgaaaaatcctgagatgattaattggtacttccctcagttacttaagagttatgagggtgaaaagatttattttgataatttaaaatatgatttaaatgataatgataaggaatctaataaagaaattttgaagaatcaaccagataatgttatcaaagaaaaactgaataatgaatacaaacttagatttagaatgatgcaaactatcttgcaatcgagagttaatgtattaccatatattaatgaacagcgtttaaataaactaaatccaccggaaaatttacgtatagcaatagaacactttgggtggaagaatagacctatcactgcataaaataatgtgatgccgggatggtttgtatttcccggcatctttatagcgatagcaattatttactgagcgtcgcgaccatcaccgctttgatagtatgcatacggttttccgcctgatcaaaaacaatgctggcggcagattcgaagacctcatcagtgacttccataccgccatgtaggccaaattcttccgccattttcttgccaagcgtcgtttggtcgtcatgaaacgcgggcaggcagtggaggaatttgacctccgggttaccggtcaactgcatcatcttgctgttcacctgatattcacgcagcaatgcaatccgttccgcccatttctcttttgcttcccccatcgacacccacacatcggtatagataaagtcagcaccttcaactcccttcgcgacatcttcagtcagcgtaatattcccaccattttgctgtgccagggcgcggcattccgtaaccagcgcagcttccggccagcacgcttgtggcgcgaccagacgcaaatccagaccggtaagcgccgcagcttcgagcatcgaattgcccatgttgttacgcgcgtcacctgcatagaccagcgtcatttcgttgaacgctttgccgggcaaatgctcctgcatggtgagaagatccgccagcagctgcgtgggatggaactcattggtcaggccattccataccggcacgctagcgtattccgccagtgtttcgacaatctcctgaccatagccgcgatactgaataccgtcatacatgcgaccaagcacgcgggcagtgtctttaatcgactctttatgaccaatctggctgccgcttgggccgagataagtaacgcgagcaccctggtcatatgcggcaacttcgaaagagcatcgggtacgagtcgagtctttttcgaagatgagcgcgatgtttttaccagtgagtttggcttcttctttaccgcttttcttatcggctttcagcttcgcggctaactgcagcaggctgttgagttcagctggcgtgaaatcgagtaatttcaggaaatgcttatgataaaacccggacatagatccctcctgtggctaacgcctcaatgaattaaaattcaatttatatggatgattattcatttgcaagtctaaagcataaatctttgtcacaaaggtggaggcaatgtcagtggtgtgtgacaataagagtatcggcaggacattaagaggaatgagccatggcaaacccggaacaactggaagaacagcgtgaagaaacacgtttgattattgaagaattactggaagatggcagcgatccggacgcgctgtacaccatcgaacaccatctttccgcagacgatctggaaaccctggaaaaagcagcagttgaagcgtttaaactcggttacgaagtgaccgatccagaagagctggaagttgaagatggtgatatcgtgatttgctgcgacatcctcagcgagtgcgcgttgaatgccgatctgatcgatgcccaggttgaacaactgatgacgctggcagagaaatttgacgttgagtacgacggatggggcacttactttgaagatcctaacggcgaagatggcgacgatgaagattttgtcgatgaagacgatgacggagttcgccactaattaagcgtagcgcatcaggcccaggtagttcctgcaacctggtgaatttgtagcccggataaggcattcatgtcacatccggcataaacaaaacgtacgttgttaatgttcgaatgcccgcgagttgaacacgcgggcatttttttagagttcgcgcaacatccgcacttcacaatcgacatggcccgtgcagccaagcgcatagtcgatatgctcaaagcccaaatgctcataaagcgcaatggcttcctttaaaaaagcggtcgtttccagatagcagcgtttgaaacccatctctcgcgcctgctccatcgccattaaggccagtttttttgccagccctttgccgcggatagccggaagaaaatacatcttttgcagttcgcaaatatccgactcactcccggttaatggcgctatcccaccgccgccgaccacttcaccctcgtactcaacgacccaatatgcatggccaggctgactatatacttgatacagctcgtcaagattcggatcggcgacggtgtagcctttatcagcggtaagaccgtattcggcggatacctgacgaatgacgcgggcgatagcaggattatcctgcagcgtcaggcgacgcattacaggtgattgcggcgcaatgttattcatagtttaacccaataaaaataaagtaattatacatttgtttaataccactctcttcttacgtacgcaagcgacttataaagtaataaagtttttgccagcctattactgataagagtattgtaacgtggcagaacattttactgtctgtatatataagttatatcaatggattttttaattcagggaatttttatggctcaagttattaatgaaatggatgttccgtcccattcgtttgtttttcatggtacaggtgagagatattttcttatttgtgtggtgaatgtgttgttaacgattataacgctaggtatctatttaccatgggcattaatgaaatgtaagcgttatctttatgctaatatggaagttaacggacaacgattttcttatggaattaccggtgggaatgtttttgttagttgtcttttttttgtttttttctatttcgcaatcttaatgacagtgtcagcagatatgccgcttgttggttgtgttttgactttgttactgttggttttgcttatatttatggcagcaaaaggactgcgtcatcaggccttaatgaccagtctcaacggcgtaagatttagttttaattgctctatgaaagggttctggtgggtgacctttttcttgccgattttaatggccattgggatggggactgttttctttatctcgacaaagatgctacctgccaatagttcaagtagtgttattatatccatggttctgatggcaatagttggtattgtttccattggtatttttaatggtactttatatagtctggtaatgagttttctctggagtaataccagtttcggtatacatcgtttcaaggtgaaattagatactacgtattgtataaaatatgccattctcgcatttttagctttattgccttttctcgctgttgctggttatattatcttcgatcaaatattaaatgcgtatgatagttctgtatatgcaaatgatgacattgagaatttacagcaatttatggaaatgcaacgtaaaatgataatcgcgcagttaatctattattttgggattgctgttagcacaagttatttaacggtgtctttgcgaaaccattttatgagcaacctgtcactgaatgatgggcgtattcgttttcgcttaactttaacgtaccacggtatgctttatcgcatgtgtgcgttggtggtgatatccgggattacgggcggtctggcttatccactgctgaaaatatggatgattgactggcaggcaaaaaatacgtatttgctgggcgatttggatgaccttcctttaatcaataaagaagaacaaccagataaaggcttcttagccagtatttcacggggagttatgccttctttaccatttctgtaagagataaaaaaggccggagcatgctccggccttcgttttcatcactgtgttttgattacagcgcggcgataacagcctgctgttcaatcagtttcgctttcgcttccgcatagccttccagcttctcacgctctttcgcgatgaccgcttccggtgcgcgggcgacaaagccttcgttcgccagtttgttctcgatacggctgatttcaccttcaatcttcgccacttctttcgccagacgcgccagctcatcttctttgttgatgaggccagccatcgggatcagcagctctgcaccgtcgatgatcttcgtaacggaaaccggacctttgtcatcggcaggcagcacggtgatactttccagacgcgccagggtttgcaggaagccacggttttcatttacgcgacgttctgcatccgcgctgcaaccacgcagcagcagctccagcggtttgcccggcgcgatgttcatttctgcacggatgttacgtaccgcaacgatcgcctgtttcagccattcggtgtcggccagtgcggcttcatcaacctgagatgcatcgtactgcgggaacggctgcagcatgatggtgtcggcagtgataccgcaaagtactttcacacgctgccagatggtttcggtgatgaacggaatgatcggatgcgcgaggcgcagcagaccttccagtacagtcaccagcgtatggcgagtaccgcgcagttctgcttcggtgccaccgttcattaccggcttggtcagctcgagataccagtcacagaactggttccaggtgaactcatacagaatgcctgcggcgatatcgaagcggaagctgtccagcgcttcgcggtacgctttgatggtctggttgaactccgccagaatccagcggtccgccagcgacagcgtcatttcgccgccgttgaagccgcaatcctgaccttctgtgttcatcagcacaaagcggctggcgttccacagcttgttacagaagttacggtaaccttccagacgcttcatatcccagttgatgtcacgaccggtagacgccagcgccgccagggtgaagcgcagcgcgtcagtaccgtgcggctcaataccgttcgggaactgcttctcggtgcgcttacggattttgtccgccagctgcggctgcatcatattgccggtacgtttttccagcagttctggcagcgaaataccgtcaaccatatccagtgggtcgataacgttacccttggatttggacatcttctggccttcgtcatcacgaatcaggccggtcatgtaaacggtgtggaacggcacctgcggtttgccattttcatctttgatgaagtgcatggtcatcatgatcatgcgggcaatccagaagaaaatgatgtcgaaaccagataccatcacgctggttgggtggaactgacgcagggcgtcggtattttccggccagccaagggtagagaaggtccacagcgcagaagagaaccaggtatcgagaacgtcttcgtcctgacgcaggacaacatcagcaccgaggttattttctttacgcacttcgtcttcgttgcggccaacataaacgttacccgcttcgtcataccatgccgggatacggtgaccccaccacaactgacgagagatacaccagtcctgaatatcgcgcatccaggagaagtacatgttttcgtactgcttcggtacgaactgaatgtcgccgttctcaaccgcttcaaccgccggtttcgccaggacatcggcacgcacgtaccactggtcggtcagcattggttcgataactacgccgccacggtcgccgtaaggaacggtcaggtcgtgcggtttaatttcttccagcaggccaagcgcgtcaactgcggcaacgactgctttacgtgcagcaaaacgctccagtttctggaactctgcagggatttcgctggaataaacgtcagattcgttacctttggtatcgaacacctgggcgctttcacggatatcgccgtcaaaggtcaggatgttgatcatcggcagggcgtgacgtttacccacttcatagtcgttaaagtcgtgcgccggagtgattttcacgcagccggtgcctttttccatgtcggcgtgttcgtcgccaacgatcggaatacgacggttaaccagcggcagaatgacatatttgccaatcagatctttgtaacgcggatcttccgggttaacggctacgccagtatcgcccagcagggtttctggacgggtagtcgcgaccaccagataatctttaccgtctgcggttttcgcaccgtcagccagcggatagcggatgtgccacatcgaacctttcgattcgcggttttcgacttccaggtcagagatagcggtgcgcagtttcggatcccagtttaccaggcgtttgccacggtaaatcaggtcttctttatacagacgaacgaaaacttctttcaccgcattggacaggccttcgtccatggtgaagcgttcacgctcccagtcgacggagttgccgagacggcgcatctgacgggtaatggtgccgccagattccgctttccattcccagattttgtcgatgaaagcttcgcggccgtagtcgtgacgggttttaccttcttctgcggcaatcttgcgctcaacgaccatctgggtagcgatcccggcgtggtcagtaccgacctgccacagggtgtttttgccctgcatgcgctgatagcggatcatggtatccatgatggtttgctggaaggcgtgacccatatgcaaactgccggtgacgttcggcggcgggatcatgatgcagaaactttcctggctttcatcgccattaggcttaaagtagccctgcttttcccagtgctcgtaaagcggctgttcgatatcttgtgggttatatgtcttttccattatttccaggttgccgtattcaggttgaaaccagccacgcggtaggctttatagcgttcgcgcgccagttgtttcagagaatcttcataaggaacgaagtctaccacttctgtgaaagcggtggcaaaatctgcaaagcttgttcgcagactaatcaatatatcgcgccggctgctgctacgcttttgcggccaggcgatctccaccggtgcaccgccgcgcggtccttctcccgctaaattatgcggaacaaagctttctgccggacgcgcccacagggcttcatccagccggtaagcctgcttttcatcttcacaggcgatgagcacgcgcttaccgctgcgccaacgttctgcggcaatttcacacaccagttgctcaacggcgcttaagccatcgacggtggtgtcattgtccagaaggtagaacgtcgcgtttttcataaatggggcttcttgtggtggatttaaatacgcatcaggtatacaccgcagcgcctgatgcgacgctgttgtgtcttatcaggcctacgagttcagtgctgtgtaggtcggataaggcgttcacgccgcatccggcaataacagccttgcctgacgcaattactcttcgccgttaaacccagcgcggtttaacaggaactgtgccagcaacgctaccggacgaccggtggcgccttttgctttaccagaacgccaggcggtaccggcgatatccaggtgcgcccagttgtacttacgggtaaagcgtgacaggaagcaacctgcggtaatcgccccaccaggacgaccgccaatgttcgccatatcggcaaaattggactccagttgttcctgatactcgtcacccagcggtaagcgccatgcgcggtcaccggattgttcagacgcggcaatcagttcatgggccagcggattatggttcgccatcagaccagtaatatgatgacccagcgcgatcacgcaggcaccggtcagcgtcgccacgtcaatcaccgcttccggctcaaaacgctcaacgtaagttaacacgtcgcacagtaccaggcggccttcagcgtcggtgttcagcacttcaacggtttgaccggacatggtggttaacacatcgcccggacgataggctcgtccgccaggcatgttttcgcagcctgccaacacgccgataacgttaatcggcagttgtagctccgcgaccatccgcatcacgccgtaaaccgctgccgcaccgcacatatcgtacttcatctcatccatgccttctgaaggcttgatcgagataccgccggagtcgaaggttaaacctttacccaccagcacgattgggcgtgcatcttccgacgcgttgcctttgtactcaatcaccgacatcagcgattcgttttgcgaaccctgaccgaccgccagataggaatgcatccccagctctttcatctgctgttcgccgataacgcgggtgatgacattcttgctgtagctgtcagccagctggcgcgcttgtgaagcgaggtaagcggcgttacagatattcggcggcatattgccgagatcttttgctgctttaatcccggcggcaatcgccagaccgtgctggatcgcgcgctcaccgctggtcagttcacggcgggtcggcacgttgaacaccatcttacgcagcggacgacgcggttcgctcttgttcgttttcagctgatcgaaactgtagagcgtctcttttgccgtctcgacagcctgacgcactttccagtagttgttacggcctttaacgtgcagctcagtcagaaagcagaccgcttccattgagccagtatcattcagcgtattaatggttttctgaataacctgcttgtactgacgctcatccagctcacgttctttgccgcaaccaataaggagaattcgctcggaaagtacattcggaacatggtgcagcaacaatgtctgccccggttttccttccagttcgccccgacgtagcagggcgctgatgtacccatcgctgattttatcgagctgttctgcaatcggagaaaggcgacgtggttcgaagacgcccacgacgatgcaggcactccgctgtttctccgggctaccgctttttacactaaactccatgcactacgctcctgaatcttaaagacaacggcggtggctacagatagaattgcaagctttcgtaactcatgtccgctgttgcgatgacttcgtgttaatcttaacgttattacggcattggcacgtcagaacaaaatctgagaggtgaatccgttgagtataattatcttagcgacgatttcgacgactcaagagaataaatgacgtttaagccatgaaacaagctaaaatcctgcaaaagacgagtttttacgggcgtatttaaagtgataatcataagatatctggtgcgggagacgctcaaaagccagctggcgatactcttcatcttgcttttgatcttcttctgtcaaaagttagtgaggatcctcggcgcagcggttgacggcgatattccggcgaatctggtgctctcccttctcgggttgggcgtgccggaaatggcgcagcttatcctgccattaagcctgttcctcgggctgctgatgacgctgggcaaactgtataccgaaagtgaaattacggtaatgcatgcctgcggcctgagcaaagcggttctggtgaaagcggcaatgatccttgcggtattcacggcaatcgtagcggcggttaacgtgatgtgggcgggaccgtggtcatcgcgtcatcaggatgaagtgttagcagaagcgaaagcgaaccctggcatggcggcgctggcgcaagggcaattccagcaagcgactaatggcagctcggtgctgttcatcgaaagcgttgacggcagcgatttcaaagatgtgttcctcgcgcaaattcgaccaaaaggtaatgcacgtccttctgtggtggtggccgattccggacatttaacccagctgcgcgacggctcccaggtcgtcactctcaaccagggaacgcgcttcgaaggcactgcattgttacgtgatttccgcattacggacttccaggattatcaggcgatcattggtcaccaggcggtggcgctcgacccgaacgataccgaccagatggacatgcgcacattgtggaacactgacaccgatcgtgctcgcgcagaactgaactggcgtatcacgttggtattcaccgtgtttatgatggcacttatggtcgtaccgctgagcgtggttaacccacgtcagggacgcgtactgtcgatgctgccagccatgctgctgtatctacttttcttcctgatccagacctccctgaaatcgaacggcggtaaaggtaagctggacccgacgctgtggatgtggaccgttaacctgatttatctggctttagcgattgttctcaacctttgggacaccgtgccggtccgccgcctgcgcgccagtttttcgcgtaaaggagcggtgtgatgcaaccttttggcgtacttgaccgctatatcggtaaaactattttcaccaccatcatgatgacactgttcatgctggtgtcgctgtcgggcattatcaagtttgtcgatcagctgaaaaaagccgggcaggggagttacgacgcgttaggcgcaggaatgtataccttgctgagcgtgccgaaagatgtgcagatcttcttcccgatggcggctctgcttggggcgttgcttggtcttgggatgctggcgcagcgcagcgaactggtggtgatgcaggcttctggttttacccgtatgcaggtggcgctgtcggtgatgaaaaccgccattccgctggtcttgctgacgatggcgattggcgaatgggtcgcgccgcagggcgagcagatggcgcgtaactaccgtgcgcaggcgatgtacggcggctcgttgctctctacccagcaaggcttatgggcgaaagatggcaacaacttcgtctacattgagcgggttaaaggtgacgaagagttaggtggcatcagcatttatgcctttaacgagaatcgtcgtctgcaatccgtacgctatgccgctactgcgaagtttgacccggaacataaagtctggcgtctgtcgcaggttgatgaatctgatctgaccaatccgaaacagattaccggttcgcagacggtgagcggcacctggaaaaccaacctcacgccggacaaactgggcgtggtggcgctggacccggatgcactctctatcagcggtttgcacaactatgtgaagtatctgaagtcgagcggtcaggatgccggacgttatcagctcaacatgtggagcaaaatcttccagccgctatctgtggcggtgatgatgctgatggcgctgtcgttcatctttggcccactgcgtagcgtaccgatgggcgtgcgtgtggtcaccggtatcagtttcggttttgtcttctacgtactggaccagatcttcggcccgctgacgttggtttatggcatcccgccgatcatcggcgcactgttgccaagcgccagcttcttcttaatcagcctgtggctgttaatgagaaaatcgtaaccgaatgaacgaataaagggagcgaaagctccctttattattgttagcaaagtgtgcttcgttcattcctgaaaaataattaaaattcaatatattgcagtggggtgggcatgataagacgcgccagcgtcgcatcaggcaaagacaaatctcgcctgacttaccttcttctcccccccagcaaactccccaacatcccgcgtacaatctgattcgtcacttggcgagcggcgcttttggccattgtttgcaccacaccatctttcttcccgccgcgtggtccggtagtgccgaacaaaatatccttcaatccaccaagaatgccgtcatccaccgctacctctttccctttcgcgggaggattattttgctgctcggtactggcctgaaagcctttttgcaacatctcataggcggattcccggtccacctcatcctcatatttgccatacaccggagagtgattaatcaagccattacgctcatcttccgtcaccggccccatccgcgaacaaggcgcgatcaccatcgcacgctccaccacagaagggcttcctttcgcatccagaaaagagatcaacgcctcgccggtgcccagttcctgaatcgccttttcggtatcaaacgccggattggcccgcatggtttgcgccgctgccttcactgctttctgatcttttggcgtaaaagcccgcaaagcatgttgaacgcgattaccgagctgcccgagcacattatccggaatatcagacgggttttgcgaaacgaaccagacgcccacgccttttgagcgaataagccttatcacctgctcaatcttatccagcagtacctgcggggcatcgttaaacagcagatgtgcctcgtcgaagaaaaacaccagttttggtttctccagatcgcccgcttccggcaattgttcatacaactctgaaagcatccacagcaggctggcggcgtacagtttcggcatctgataaagtttctcggcgctgaggatattgataacgcctttaccgttggcatcggtgcgcatccagtctttgatatccagcatcggctcaccaaagaagtgtgctgcgccttgctgttccagcgacaacagcccgcgctggatggcaccaaccgatgcgctactgatattaccgtactgattctggaaggatttggcgttatcgccgatgtactgggtaattgcccgcagatctttaaagtcgagcagtaacagcccctgatcgtcagcaatgcggaagatgatattcagcacgccagattgcacatcgttgagattcaacagtcgtgccagcaacagcggccccagatccgaaaccgtcgcccgcaccggatggcctttctcgccaaagatatcccacaccaccaccggattggcatgcggttgccagtcattgacgccgatatttttaagccttgcgagcagtttttccgacaccgttcctgcctgcgcgacgccggtcagatcgcctttcacatcagccataaacaccggcacgccgatttccgacaatgactccgccagtttttgcagcgtaacggttttacccgtccccgttgcgccggtaatcagcccatgacggttagccattcccggcagtaaaaacagttctgtgtccggcgtgcgggcaattaacaggggttcactcatgagatatcctccagtttcctgcctggagtataggcaacgtccggcaaagagaatacgtgtaatgaagagaaaataacctaaagcgtgttgccgtgataaatctgatacccgaggtcaacagtgttgtggttgtgatcgttatttttaattttgctcagcaacatttgggcggccatccgaccaatatcaaaacggggagtaattacgctggcgaggcttgggatcatttgcctgccaatctccagcccatgaaaacccgcaatggaaatttgttctggcacggcgaggtttcgctcgcggcacagcagaagcgcacccatcgcaatatcgtcattggtgcaaaatacaccgtctaaatccgggtttgcgctaagggcatcacgcattaactgcattcctaaatgaatggatgagatggcgcgtggattcatgcgtaatggggaaagattatgcagcatcatcgcatcgcaatacccctgataacgctgttcatcgcgggtgtcatctttggaaccgagatacagaattttgtgcctgactcgcttctccagcatggtacacaccatgtcaaaagcggcctgccgattatcaaaaccgacctccatatccagccgttctccctgtacatccatcaattccacgaccggaatggtggctgaacgcagaaatttcaccgtcctgatggtgtgatatttttccgaaagtataatcccgtcaatgttataagagagcaggttaatcaccgactcttcttcggaatcgcgatcgtaattgtaattagcaataagggtctgataattatgctcagaggtgacggattctattcccgcgagaatgtcagcgaagagttgattttgaaatgacggaatcaagataccgagggtataactttgtgcattcaacaacatgccgggagcgcgattagggatataattgatctcttccataattttggcgatgcgctcgcctgtttcctttgccacctttttcggcgagcggatataacgactcacggtcatttttgttacgccagccagcgtagcgatatcctgtaaagaaattctgtgattgcgcataacttctcccaacgtcgggggaatcttcaatcttcccccgaaactacatcacaatattttattctttcagtgcaatacggcgttaatggctaacacgcccagcaaacccataatagaaataagggtttccatcaccgtccaggtacgcaacgtttcaccaaccgtcagattaaaataccctttaaatagccagaagccagggtcgtttacgtgtgacgcgatcacgctgcccgcaccggttgccagtaccattaaagcgggatcggcatgggtaacgttgataatcggcaacaccacacccgcggtggtaatggccgcgacggtggcagagcccagagcgatacgcaacagcgccgcaacagtccagcacatcaataacggcgaaagtgtagttccggtcattaagtgtgaaatatagtgcccgacaccgctatctactaatacctgcttaaacgcgccgccgccagcgataataaacacaatcatcgcgatagcgcctatagaatccccaatgatatccatgatttgctcgatggtgcgtccattacgtcggcccagtgtgaaaatcgcaataacaatggcaataaacagcgcaacggcagggttaccgacaaattcaaagaagaggcgcacggtgttagttttcggtaacgtaatttcacaaacggcggcgatagccatcaggatgaccgggatcacggcagcgaaaatactgttccagaaggagggcatctcctcttcgctaaacagatgaggattaaataagccttccggtggtgctttctcaaagcgagttagcagtttagaaaacagcggtcctgcgacaataactgtcggaatggtaatgataaatccatacagtaaagtcgttccgagattagcctcaaagatagtcgcgatggcagtaggccctggatgtggcggcagaaaacagtgggttacagagagcgctgctaccattggtacgccaacatacaacaggggtaatcctgatgatgctacgatggtaaataccaacggcaacagcaggacaaaacccacttcaaaaaacatggcgaggcccacaaccagaccggtgatcactagcgcccattgcacgcgttttttaccaaaagtagcaatcagcgtagtggcgatacgttgtgccgcacccgtatcagaaatcagcttgcctaacatggccccgaaaccgaggatcattgccagcccgccgagcgtgctgccgataccattttgtatagagtgcaggacggcctgtgcatccatcccttcggcaaatccgacgacggcagctaccagaacgagggcaataaagccgttaactttaaagccgatcatcaggataagaagcagcgcgacgcctgccgcaataatgattaatggcatagtctttatctcttattagtgccagaaaagcagcgctttcgcgctgcacgtaggggggctgttaaacagccactaacatgccgccatcaacaaacaacaggtggccgtttacgaaatcagaggcttttgaagaaaggaacaccgcagcaccaatcagttcctgcggatctccccagcgtgcggcgggggtccgtttgcacaaccaggcggtgaaggcttcgtcctcaaccagtgctttagtcatttctgttttgaaatagcccggcgcaataccgttgacctgaatattgtggcgcgccagctcgacgcacatgccgcgggtgagcatttttaccgcccctttcgatgcggcataaggggtgatggtgtcacgtcccagttcgctttgcatcgagcaaatattaataactttacctgccttgcgttcaaccatgtgacgagttaccgcttgcgataccaggaacacggcggtctggtttactgcgatcacatcattccactcttgttcagggaactcagtaaaaggatgacggcgctggataccggcgttattcaccagcacatcaatggggccgatgtccttttcgatatgttcaacggcggcatcaatttcatgtttatgagtaacattaaaaggtgcggcaacggcctgaataccctcctggtggagtttttctacagcaagttctgcgcgttcggcagtaatatcattaataattatttgtgcgccatatttacccaggccggttgccagtaaaaagccaatgccctgtgctgaaccggtaatcaagatattttttcctgccagtgaaaatagatcgttcattgtattattcctttatttatctcttagaaaacaagctggacttttgctgcctgggttttatcaccggcgaaacgtagcgcctcttccaggtcagtgaagggatattcagcactcagtaaaggcagtggattgataacgccattcgccagccatgacactgcggtattaaattcgctggtaaaacggaaagagcctctgagtgaaatctccttaccaatcaacgtcatcattgggaattctgccatcgcgcctcccatacctacctgcaccattacgccgcgtgcacgagtgacctccagacaggtattcactgatgaaggatgaccggacacttcaaagctgacatcgaaatagcctttttccgctttccagtgatccatgtcgtcgttttgtgggtttacgagcacatccgcccccatctctttgcccagcgaaagggaacggggactcacatcagcacagacaatttccgcggcccccagtgttttcactgcactgacaatcaggcagccaatgggtccaacaccggaaataaatactcgcttgccctgtaactcgccggcctgatgtgcggcatgaatcgcgacggctaaaggttcggcaaaagccataaccttttcgtcagctttggccggataagggacacattgcgacgtttcgaccattttataacgggtaaaaccaccatcaacatgagggaaatacatggcactgccaaaaaaacgcatatctgtacactgattctcgttatgttcaatgcagtatttgcagtgaccgcacggtttagacggattaatggctaccgtttgcccttcatgtaattctgatgagtcgctatgaataactttaccgataacttcatgacctaacaccatcggtgcctttatcatgaaattacctacttttccttcctgataataatgtaaatcggaaccgcaaattccacctcgggttatttgtactaatgttccattattattccaatctatcgtctgctcggtaacggcaacagttttcttgcccgcaacaacgcaggactgtgttttcacttgcataaattcctcactggtcaggtagacacctcggaagcatttaagcggttttaactgtcattatttgtgatgaagatcacgtcagaaaattgttacattactatgttacgcataacgtgatgtgccttgtaattcttatcagtagaaataaaaaaacgtgaaattattatgccgccaggcgtagtatcgcagcaggtaagatgattcaggagattttaaatggcgggtgaaagctttattttgatgggcgtttcagggagtggtaaaacattaattggtagcaaggttgccgcgttattatctgctaaatttattgatggtgacgatcttcatccagccaaaaatatagataaaatgtcgcagggtattccattatctgatgaagatcgacttccctggctggaacgcttaaatgatgcttcatacagtctttataaaaagaatgaaacaggatttattgtctgttcatcattaaaaaaacagtatcgtgatattttacgcaagggtagcccccatgttcatttcctctggttagatggcgactatgaaactattctcgcgcgaatgcagcgtcgggctgggcattttatgccggtagcgttactaaaaagtcagtttgaggcactggagcgtccacaagcagatgaacaggatattgtgcgcattgatatcaaccatgatattgccaatgtcaccgaacaatgtcggcaggctgtgctggcgatacgacaaaacagaatatgtgcgaaagagggcagcgcctcagatcagcgctgcgaatgattttcaaaaatcggctttcaacaccacgcggtaacgcgccttaccgtcgcgcacatgctggatggcgtcgttaattttcgacatcgggaacagttcggtggtcggcgcaaccttgctgcgggcggcaaaacgcatcagcttacgcagctcataaggcgtgccggtagcagaaccagagacgctgcgatcgcccgcaattaacgtaaaggccggaacagacagcggcgtgagaaccgcaccgaccgtatggaaattaccgccataggtcagcgcctcaaaatagggctgccagtcgaggctgacgttgacggtgttgataatgagatcaaactgccccgccagtgctttcagtgcctgcggatcgcggctattcaccactttatcggcacccatcgccagcacttcctgctctttcgccggattagaactaaaggctgtcacctcgcatcccattgcgtgcagaagttttatagcgatatgccccagcccgccaataccaattaccccaacgcggctggtagcagtgatatggtgcatcaacagtggtttaaagaccgtgataccgccgcacaacagcggcccggcggactcgatatcaatattttctggcagtggaatcacccattgccagtccgcacgcaacttctcggcaaagccaccgcgattcataatcgtcggcaccgcaccttgctcgcagttgatctgattaccgctaatacaggcgtcgcagtgaccacagctacgcgccgtccagccaatcccgacacgctgaccgacctgcaaacctttatcctgcgcggcgctcccgagtgccaccacgcgcccaatcacctcatgcccggcaaccagcggatattgtgaaaatccccattcgttatcgatcatcgacagatcggaatggcagatcccgcagtaatccacctgcacttcaacatcttgtggcctcagctcaccgggatcgtactcataaacttccagttcgccgcccgcttcttttgcggcatagctttttatcatcgacattttttggtccttctctggtgttgtttgggaagtgtagagcatggcagggcggggtgcctggagtgtgacaaaggttacacatcgctgtatgcaatgctgaaaatttcagcacttagcgaggtgcgagcaagctggcgcttgcatggtggcgtgcgacaggtataatccacaacgttttccgcatacctcttcagtgccgaagtggcgaaatcggtagacgcagttgattcaaaatcaaccgtagaaatacgtgccggttcgagtccggccttcggcaccaaaagtatgtaaatagacctcaactgaggtctttttttatgcctgaaatccagtgtttatctatctttcccgctatattaactctctcaaggtcaaccgatatcaacgtacatctaccaacatatgttggtacagatgatggtatttccggttcgataatgcttgtaccaacagggagggaatacgatggcattaacagatatcaaagtcagagcagccaagccaacggataagcaatattagctgactgatggtggcggtatgcatctgcttgtccatccaaatggttctaagtactggcgtttgcagtaccgttatgagggaaagcaaaaaatgctggcacttggggtttatcctgaaatcacactagcggatgccagagtacgtcgtgacgaggcgcgtaagctgcttgcgaatggcgtcgatccgggagacaaaaagaaaaatgataaggttgaacagagtaaagcacgaacctttaaagaagtcgcgattgagtggcatggcaccaataaaaagtggtctgaagatcacgcccatcgtgtgctaaaaagtcttgaagataatctttttgcagcgcttggtgaacgtaatatcgctgagttaaaaactcgagatttattagcacctattaaggccgtagaaatgtctggacgtcttgaagtggccgctcgtcttcagcagcgcactacagccatcatgcgctatgcagtgcaaagtgggttaattgattataacccggcacaagagatggctggggcggttgcttcctgtaatcgacaacatcgtcccgcgcttgaattaaagcgcatccctgagttgcttacaaaaatagatagctatactggtaggccgctaacccgatgggcgatagaactcactttgctgatctttattcggtccagtgagctgcgttttgctcgttggtcagagatcgatttcgaagcgtctatatggactatcccaccggagcgggagcctattcctggagtgaaacattcccatagaggctcaaaaatgcgtacaacgcatctagtgcctctttcaacgcaagctcttgcaattttaaagcagataaaacagttttatggggcccatgacttgatatttattggtgatcacgattcgcacaaacccatgagtgagaatacggtaaatagtgcgttacgggtcatggggtatgatacaaaagtagaggtttgtggtcatggctttcgaacaatggcctgtagttcattggtcgaatcaggtctgtggtctcgtgatgctgttgaacgtcagatgagccacatggcgcgaaattcagtgagggccgcgtatatccataaagcagagcatctggaagaacggcgattgatgctacagtggtgggccgattttctggatgtaaacagagaaaggtttatcagtccatttgaatatgcaaagattaataatccattaaaacagtaatcatcccgggcaaatgcccgggaattattctaggattattttctttgttaaaaaagacaaacggtattaactgatgtatttactatttaccgctccctgcaggggggattatcagaatccgcggttattcattatttatatacattcaataaaaaagtaacctcataaaaaatcctgtactcacagggtgatgcgggataactgacgtaaggagtgctgcagggatttgatggtcccttgtagactggccccctgaatctccagacaaccaatatcacttaaataagtgatagtcttaatactagtttttagactagtcattggagaacagatgattgatgtcttagggccggagaaacgcagacggcgtaccacacaggaaaagatcgcaattgttcagcagagctttgaaccggggatgacggtctccctcgttgcccggcaacatggtgtagcagccagccagttatttctctggcgtaagcaataccaggaaggaagtcttactgctgtcgccgccggagaacaggttgttcctgcctctgaacttgctgccgccatgaagcagattaaagaactccagcgcctgctcggcaagaaaacgatggaaaatgaactcctcaaagaagccgttgaatatggacgggcaaaaaagtggatagcgcacgcgcccttattgcccggggatggggagtaagcttagtcagccgttgtctccgggtgtcgcgtgcgcagttgcacgtcattctcagacgaaccgatgactggatggatggccgccgcagtcgtcacactgatgatacggatgtgcttctccgtatacaccatgttatcggagagctgccaacgtatggttatcgtcgggtatgggcgctgcttcgcagacaggcagaacttgatggtatgcctgcgatcaatgccaaacgtgtttaccggatcatgcgccagaatgcgctgttgcttgagcgaaaacctgctgtaccgccatcgaaacgggcacatacaggcagagtggccgtgaaagaaagcaatcagcgatggtgctctgacgggttcgagttctgctgtgataacggagagagactgcgtgtcacgttcgcgctggactgctgtgatcgtgaggcactgcactgggcggtcactaccggcggcttcaacagtgaaacagtacaggacgtcatgctgggagcggtggaacgccgcttcggcaacgatcttccgtcgtctccagtggagtggctgacggataatggttcatgctaccgggctaatgaaacacgccagttcgcccggatgttgggacttgaaccgaagaacacggcggtgcggagtccggagagtaacggaatagcagagagcttcgtgaaaacgataaagcgtgactacatcagtatcatgcccaaaccagacgggttaacggcagcaaagaaccttgcagaggcgttcgagcattataacgaatggcatccgcatagtgcgctgggttatcgctcgccacgggaatatctgcggcagcgggcttgtaatgggttaagtgataacagatgtctggaaatataggggcaaatccaccttgtgctgatatgaatacggatattttatacagaatacttttcagtacaagcgactgtattacagtctgccatatatgattacctgtgatcaggaagaataagtggctgaggtttcaaactgtctgccggtatattcctctctcccttaaaaaccataacaggttagttatcttcgtctgtcagcggattgaatggcggtatattttcagtacaaataccggtcatccactgaaaaatacctgcgaaatgacgggcactgatttttctactgacgggctgatgagacgttatgtcactggcggtaataatcagtggcacactgtagcctccctgcacatgaccataatgatgaacaggattggcactgtcgctgaccgacagcccaaggccagaaaagtaaagcatggcgaaatgacgtgagtaccggcgaaggataccatcaagctggccaagaaagttatccagtttactgatgctggcgaggtaacaggcaatttttcggggatactgctccaggtaattattcggctaggagttaaggctgtcacacggatttggatgagaacccatcatgtgcaggaaaattatcttcggagaggatgtatccgccagcgcacgttctgtttcctgtaacaacagtttgtcatctgttttacgggaagcgaagctgcctttcttgaggaaagtggcatgctccgcatcagaagcaataacagagatgcgtgtgtcatgctcccccagttttccttgattggatatccaccatgtgctgtatcctgcttttgctgccagcgccaccacattgttgccggaatcagggttctgctcatagtcataaatcagtgtccggctcagggaagacactgtactggaggctgtcgaggtataatcgtcaataaataaaccgggtgccgtattcagccacggtgtggttggtacgggatagtcatacactgacatataatccctgcgcacactctcaccagtgacaataacaatcgtatcatataacggtgctcccggctggattttccagttgtcagccccgtgctactcagttgttcataacgctgcatttcacgtaatgtgtcagttgtccccacaactgttcctttaaccatccgcaatggccaacggtttacagagcataatacgaatagccgtagagccagccagttacggtggtcgcgatggtgtgtccgccagaaaatcaccacgaataccagaatcgcggcactgaccagaaaatgataaacaggaaacacggggcggttcactttgctttctcctgtagtgttttctgtaggttctgaaccggttctagcggggttgtgaggctgatggcaatcgccgggctcttcctgcatgttacactggtactgcaagagggggccttcgctcctctgacattactcagtattttcactactacaccccatctgccatccataacaaccgattcaccccctcgcgaggcgttgttgcccgtcacccggacagacaccgttatggacttctcttgttgcacgatcgatcaattgttatgcatgctgacaccacaaccccggtgggtatgaccgatgcctttctcactctcttcccggtcatcgtcggccttccccgttattgtggcgtgtcagcaccctcgacggcatttcgatggctgctcagtgttcactcacgttacggcccgcataacccgttgacttcctgaagaagtcgtttcagggagagattcagcccttttgttacctcctggaccgcttcttgtccttccagtcggagcgagagttagccggggcggactttcaccgacggaaagatcgtgcatttcaaggcacacacaacaatatctgcgagcgtgctatccgtccggtcgttatgggacgaaaggcctggttgttcgctggttcactggtggccgggaaccgcgcggcacagataatgagccttctgggaaccgcagtctggagccacatgcttggctgacggacgtcctgacgcgtctgccggagtggccggaggagaggttggctgagttactgcctcttgagggctttaccttcttcgggtaagtgatacctgccgtcaggtgtttgtgcaccgggccataacctgcagttgggaattgaacgcctgacaacaggaaatgagctagagcagtaaacacgcgggctgacaatgggtcagaatatgagttagcccggcgttattcctggggtcagtacttcagatctagcctccggtaccagactagctagcccctacgcaaccaaataaatcaaccatcgtcagagtgcaatcgttcatatacactgtcggtgatgcgctaaaaaatgcgttaatgttgagttcctcgaacccttaccaattaagggacatagccagatacgcaactggctgatgcaagcagtctaatgtctttagatccgctggcctgcgggcatgacaatgtcaaacagtcaaagattgtggcgttgacggtcagtcttggggacaaaaaagctcagtattctcgttggcaaccagataatttaacagttgatgctgaaacgaaataggcatcttggttctgtaatgccagtcagttaagcaactgactggctctttttcggggctgtggggtatttccagggcctctcctttaccactctcgggaaggccctttcccttcttgtcggtaatttcacaagttgtcccatacttgcaagatcgcgcatcagctccggtatacgtcccggtgaagcgccctgcaatgtcatcagcattctcatcaccattccgcatgattctgagaaactcagttgattcggccagtaacctttcagatgttccgccattttaatcatctgatatctcaccagattataagccagtaagacaccccacagctcttgctccacaagctccggctttttacttctcagcgtcagcctgctccgttgcatcgtctgttttatctccctgtatcccagttcgatttcccagcgatgactgtacagatcccccatttctcctccggggaagcgcatggcgtccgtcatcgacgtcagcagatggcagacttttcctttgcgcgtcacggtcagcaggcgggcagtcacttcatttcccagtcccggccacttttttcgtgcctgcgggctggttttcagcttcaccagatgatcgcctttacccagttttctgatctcttcatattgcgctccctttctgagaggtatcatccagtggcggtgttctcccgccaggctccaggcatttaacagtcccagtgagtaataacctttatccattaacgtcagagtgttatcgccggtttgttctataagttgctcagcaagctcattttcgctgttcttcatcgtgccgaaggctgcagccgtcagcagatggctggtcagttccatctggcagaccattttgacctgcgggtagagcgccgggttcccggcatgtgtctggcgggggaaggctgcatcgttctctggtgtatccggtgtgcgccagaacacaccatcgatggccagcagggtcaggccgcaccagtgcggatgcggcgtggcgttatgccagagctgcgctgttttcgtgaacacgcggcggacagcctcacttcccaggcgctggcgggcctgaataacggcactgggggcaacgaaggggcgattgcccggcagcatgatgtccaggcgattcacaatctggtgaagaggttctttacgctcaagcgccatgccaacaatacaccagaccatcatttcgaggggaagacggcgcttgcgtagcgttacagtacctgattcggcaaggcaacgagagatgagttcggggtcgaggtaatcccccagagaagtcagtgggttacgcagagaatcgtaacgggataccagatcaagagcctgtccaatgtgcataaaaaaatccggaaacaagtgagcgtttccggattcttacacagccactggatcggtcaactgatccttaactgatcggcattaatcttggttctggtgtttgtaacaaactatcagctacaaaaatatgctcaatttgtgacatcagtaacaaaacgcgttttgttatgtggattgcttgttttttgatctggtataacaggtataaaggtatacagaaaagcaaagaaatactgcaaaggaaaacagctataacgtaagctaaagtaataacctctcagtctttcctcatttgacgaagggagttttattcaacctgaacggactacgaaaatgagcacaatgaataagtcaatttttgaagcagggttgaactgtgccagtggtggaatatctggcgaacattgttttttgttggtgacccaaaactgtaggtgggtatcagttttatctttcatagagtgaaatatgttaagaagaaatggaggaaaagattgtactgattaggtattgataacaatcaatagtactggcgtatttgaagacaatataattatttctggatattgttgaggctccctaatatttactttaagggctatattagaataacacaggaaacaaatatggcaacagcatggtataaacaagttaatccaccacaacggaaagctcttttttccgcatggcttggatatgtatttgatggctttgattttatgatgatattttacattcttcatattataaaagcagatcttggcattacggatattcaggctactttaatagggacagtggccttcatagccagacctattggaggtggtttttttggtgccatggctgataaatatggtcgtaagccaatgatgatgtgggcaattttcatttactcagtcggaacaggccttagcggtattgctacaaacttatatatgctcgcagtttgccgttttattgttggcttagggatgtctggtgaatatgcatgtgcttcaacttatgcggtagaaagttggcctaaaaatcttcaatctaaagctagtgcttttttggtaagtggtttttctgttggaaatattattgcggcacaaataatccctcagtttgctgaagtatatggatggagaaactctttttttataggcctgttaccagttttactagttctttggatcagaaaaagtgctccagaaagtcaggagtggattgaagataaatataaggataaatcaacatttttgtctgtcttcagaaaaccacatctttcaatctctatgatcgttttcctcgtctgtttttgtctatttggtgcaaactggccgataaacggactacttccttcctacctggcagataatggagttaatacagtggtcatttcaactctgatgacaatagcaggtttaggaacactgacaggtacaatattttttggttttgttggtgataagattggtgtaaaaaaagcctttgtagtcggtctaataacttcatttattttcctttgtcctcttttttttatttctgtgaaaaactcttctcttataggattatgtctctttggattaatgtttacaaatttaggtattgcagggttggttccaaaatttatatatgattactttccaacaaaattaagaggattagggaccggtcttatttataacttaggggcaactggaggaatggccgcacctgtattagctacatacatttcaggatattatggcttaggtgtttcattattcattgttacggttgcattctctgccttattaattttgttagttggttttgatattccaggtaaaatttataaactatccgtggctaaatgattggaggctttatgattaattatggcgttgttggtgttggatactttggcgctgaattagctcgttttatgaatatgcatgataatgcaaaaattacatgtgtatacgatcctgaaaatggagaaaatattgcccgtgaattgcagtgtatcaatatgtcaagcttggatgctttagtctcaagtaaattagtcgattgcgtgatcgtagccaccccaaattatctgcataaagaaccagtaattaaagcagcaaagaataagaagcatgttttttgtgaaaaaccaattgcattaagttatgaagattgtgtggatatggtcaaagcgtgtaaagaagctggtgtgacctttatggccgggcatattatgaattttttcaatggggttcaatatgcacggaagttaattaaagaaggtgttatcggcgaaatattatcatgtcatactaagagaaatggctgggaaaacaaacaagagagactttcctggaaaaagatgaaagaacaatctggtggacatctatatcatcatatacatgagttagattgtgttcagcatttacttggagaaataccagagacggttactatgattggtggaaatttggcccattctggtccaggatttggcaatgaagatgatatgttatttatgaccttggaattcccgtcaggaaaactagcaaccttagagtgggggagtgcatttaactggccggaacattatgtcatcatcaatggaactaaaggctctattaaaattgatatgcaagaaacagcagggtcacttaggattggcggtcagacaaagcattttttggtccatgaaacacaagaagaagatgatgatcgtcggaaaggcaatatgacctcagaaatggatggcgctatagcatatggtcatccaggaaaaaaaacaccattatggcttgccagtttaataagaaaggagacgttattcctccataatatcctctgtggtgcaaaacctgaagaagattatattgaccttctcaatggtgaggcggccatgtcggcgattgctactgctgatgctgccactctttcaagatcgcaggacaggaaagtgaaaatcagtgagatcattaaacatacatcagtaatgtaaaaactatacgcctcttgatttaattcaggaggccttttatgtatgatcaagaattttatcttcgataatctcataattttagcagtgccatttatgataaaaacatcccttaaaaccaatctaatctttttcttcctctgtgtatttgttccccatatggcgtcataatttacgctacgtaatacgggatagttacgatacgcagcgatagcgctaagttttagttaaaatcccccatcagcgggatatggggatctctgggaggttcaggttttagcatcgcgactttaatacgacagacgctggtgacgatgatgccaagtagtgactcttccgaataaggttcccactgaccaattggcgcgcgcttcgcaataaaatctcccttcgcccagtattgggaaaagtagatacattcaaactgtgtacgctgtttcgtctcacagttcacgacattgctggccgatgagctgaccattgggcctatccgggctgtcccgatggatattacgccgaagtatgtgggaattgccagcggattgatgaacgccggttccgctgtcgccgacattatttcacctatcgcctttggcattattatcgacaaaacaggcaactggagtttaccattctacggttccgtcgcattgcttgttattggtatattcctgacgttcttcatgcgtccagataagtcattgtaaaagtcgaatcagggctgaagtggcacactgaatttggccacctgaacagaggtgatatgctcacctcagaacaacacaggtgctccaatgaaaaaaagaaatttcagcgcagagtttaaacgcgaatccgctcaactggttgttgaccagaaatacacggtggcagatgccgcgaaagctatggatgttggcctttccacaatgacaagatgggtcaaacaactgcgtgatgagcgtcagggcaaaacaccaaaagcctctccgataacaccagaacaaatcgaaatacgtaagctgaggaaaaagctacaacggattgaaatggagaatgaaatattaaaaaggctactgtagattcaatctgtcaatgcaacacccctttcaattatctctttcggtgttttgaacttcagtgtctttctcggtctgttgtttagctgagcagcaaccagatctagttcatgttgagtatattgggcaagacatgtctttttaggaaagtactgccgaattagcccatttgtgttctcatttgttccccgctgccaaggactctgaggatcgcagaagtaaactttaacgccggtgctgacagtaaattctagatgtctggccagttccattcctctgtcccatgtcagtgattttctgagttctgacggtaaactcaggaatttgtcggtaagagcctgatttactgagacagaatctttgcccctgagtctaaggatgatcgtataacgtgattttcggtctacaagtgtggctatatgagagttttttgtacctgagactaaatcgccctcccaatgccctagagagcgtctgttatcgatatttcgggaacgttcgtgaattggtgttccgttcactatgttaatcgtacctctttcgcctttgcgggtatgacgcctgccatggcgaaggctatgcgaccgtcgcagatgctgtatattcaggtggtgtagcgcttcacggctacgaaagtacagcgttttataaattgtctcaggtgatattcgcagcgttttttgacgtggttttgttcgccttaaccatcctgatatttgctctggagaccatttcatctccagcttttccagaacaagctttcgcaatggtaaattttgatccagtaagcacggttttggccttttcgccattctgttggctcggttattagcatcaacagctttgtaatagcgtctgccccgattacgctgaacttcacgtgagatcgtcgaaggactgcgattcagcgcagtagctatcgcacgaatgctcattttggctgacaaaccagctcgtatctcctcgcgctcagacagtgtcaggtgagctacagcccgcttacgctcatggggttttatgccgccagtatcccttaacatagtgaagatcgttccgggttttgaacccaggatattcgctatttcactgaagcctgttccgttcttccatagttcaaaaacagaggctttttcctctgctgtaaatgttcgtctcattcaaaaaacctccgcaaccccatgttttcacataactgttgcgttgaccaattgaatctacagttgctttttttaatatatctcgctcaaggcgagcttcatttaacgccttacgcagttgcagaatttcagattccagttcagccaccgtgcgggaaccaggagtaccgagcccttttctggcggcggtaacccattgtcctaaagtgccttcaggaagagataatcgggaagcgccttcactgatcgaaagttgattttcaagaaccgttctgacagcttcggctttgaactttttagagtaacgttgggtttttctgctcattattagctccttctgatgccattctatttcaggaaggagtgtccgttaaactcaggctacctcaggaaaaaccgtcctgaaaaaccagacggcagacgggctgtattacgcagtcaggtacttgagctacatggcatcagccacggttcggccggagcaagaagcatcgccacaatggcaacccggagaggctaccagatgggacgctggcttgctggcaggctcatgaaagagctggggctggtcagctgtcagcagccgactcaccggtataaacgtggtggtcatgaacatgttgctatccctaactaccttgaaaggcagttcgccgtgaccgagccaaatcaggtgtggtgcggtgatgtgacctatatctggacgggtaagcgctgggcgtacctcgccgttgttctcgacctgttcgcaagaaaaccagtgggctgggccatgtcgttctcgccggacagcaggcttaccatgaaagcactggaaatggcatgggaaacccgtggtaagcccgtcggggtgatgttccaagcgatcaaggcagtcattatacgagcaggcagttccggcagttactgtggcgataccggatcaggcagagtatgagtcggcgtggaaactgctgggataacagcccaatggagcgcttcttcaggagtctgaagaacgaatgggtgccagcgacgggctatgtaagcttcagcgatgcagctcacgcaataacggactatatcgttggatattacagcgcactaagaccgcacgaatataatggtgggttaccaccaaacgaatcagaaaaccgatactggaaaaactctaacgcggaggccagttttagttgaccacaacagactacctgaagggagccgcggtcgcctggcagttgcagtagcaggagatcatccagccgcagtacaggtcacgatgactctggttaatgataccggctttgaccccgtattttccggctctatcgctgaatcatggcgtcagcagccgtgcacaccatcctattgttgtgactgggaggctgccaccatgcttcgcgctttccctctggcgaaaaagggagaaggacgggcccgtctgccttcactttatgccagcttcggtaagctgggtgagacaccgactcatgaagatatcattgataacaatcgatccatcaactggcctgtataacgtggctgccggtgattaagaaagctgcacctacctaagtagtagcaaacgcacactttttagaaaaatcgatggtcagaaactggattagcaattccgttccatggttgcttttgatttacgttggcgtctgatcattgatttatcctcaaaagcccaacctcattggtaatgaaccagctccgtgaatgtccgctctggcacagagcgaaattttttgatctcccccctgaaatctaaacttagtcatgtcacgtttttgggtttctaaaattttaacttcgcgtttttcgttgccgtaagggttatacagaaatgtccgttaagcagagttcaaaattgattgccgtgatcacgactggtttgaaagccgcgcccaagcctgtacagctctggtttgcgttgattatgaacctgtcagcctaaagcaagcggatggacgatgagtattggtaatctttcagagtccggaaaagttcagccccagtctgaacaggcttgctggcgccagtccagtttcattcagtcgtggtttggttcttacggcctgtgcaatctacctcattaggcacatcggcctgccagataccggctcggggtgtatttccgcttccacgctgaatactgttctcagcaatcctggggtcatcacctcttctggtgtgccttgcgccataacatgtccgtttgccattaccaccagttgatcgcagtaccggctagcctgattaaggtcgtgcagcacagcgaccaccgttttcccctgagtccggagttcgcccatcaaccgcatcaggtccacctggtgattgatatcaagataggtggttggctcatcaagtaatacaacgggcgtattctgggccaggaccattgccagaaatgcgcgctggcgctgaccgccggaaagctcggttaaccgacgaacggcaagatgattgatccgggtctggttcatggcgacattaactcgtgcattgtcttcagcggagagacgcccccagagtgacagccagggattacgaccatacgaaaccagctcctggactgtgatcccctctggcgttaaatggtgctgaggcagcagcgaaagcctgcgggccaactggcgcgatgagagcatatttatgggattatcgccgagaaatacggtgccagactgcggcattaaaagccgcgaaaaacagtttaacagcgtcgatttcccgcaaccgttaggaccgatcagggcggtgatcttccccgttggcagtgagagtgaaacgtcgttaagtaccttgtctgtcccgtaactgaccgtcagattttcagttcgtaaagtcatttatcgcattctcacaagcaaccagacaaaccacggcgcaccgataatggcggtcagcacgccaaccgggagctccagtgggggatgaataattctcgccagcagatcggcaaccaccaacagcaacgcacctgtcagggccgaaacaggcagcagtctgcggtgacgtccaccggtgatgctacgcatcatatgcggcaccacgagaccaataaagctaatcgggccgcaggcggccacgccggtagatgtcatggcgacagctagtaacaaagcccagaatcgggtatggggcaccgacacaccgagcgtggtggcgcgcgcatcgccgagtgcaaggaggtcgagatcgcggcaaaaactcaggctcagcggcagaaataaaatcatcagcgggatggcaatcttcacaaagctccagtcacggccccataagctgccggtcagccacagcagggcgttgttcacatcctgcgggcgcgagagcatcagataatccgtcaggctggcccagcatgcagaaagcgccacgccggtgagcgccagcttcatcggctggtgggtctttgccagcatcttcagcaatatcaaccccgccatgccgcccgcaaaggccagcagcggcagcaccatcacgggcagtgacggcataagaagtagagcccccacagaggccaggctggcggcatggttaacaccgagaatatccggtgatgccagagggttgcgcacaatcccctgtatcagcacgcccgccacggcgagggctgcaccgacaaacagtgccagcagcaagcgcggcagtcggtactccatcaatacataataatgctcgtgtccggcctgccagtcggtcagcagcgcgcgccacggcacggggatcactcccatatggagtgataacagcgcacagcccgccagggcaagggtgatgaaaataaccagcgcaattttcatcctcgcctcctcacaagccagacaaagcaagggctgccaatcagcgccagcactgcgcctgcgggcagatctccggggaaggccagcgcgcgtgcgagtacatctgccagcagcatcagcgtggcccccagcagcatgctcactggcagtacgttgcgctgatcgaagcctgcccagaagcgcgccagatgtggcaccagcagaccgataaacgccaccggacctgctacgctgacgcacgcaccaaccagaagcagcactaacatattgatgaccaaacgtagcctcgtcaggttcactcccagcgtatgggcggtgctgtcgctgaggttgagcaggttcagttgattcgccagcagcaacacgacagggactgcagtgaccaccaccggcaagagctgccagacatcctgccagcgggcgtgggacactccgcctgccagccagtaaaagatgccgtaagcatgatcttcggccagcagcagggtgatgcgggtaaggcccatacaaaaggccgacagcgcgatacccgcgaggatcagtttgtttctgtcatgggtatgacgaaatccgcctcctgcggtcatgaccagcagccagctcacgccgcccccgcatgccgcgatgaatgacagagaatagcctgcaatcggcgtcggactcagcgcgctggtaagcgccatagccagcgccgcgccgctgttaatgccgagcagtgaaggagaggccattgggttgtgggtcagggtttgcagcagcgtgcccgcgagcgccaggcttgcgccgatcagaacggcgaccaggcttcgtggcaaacgaaggttttgcaccagcgcttctggtagcgttggcgtgtgtccaggcagcagggcgcgggttgcatctgctccggaaacaggaatggccgagtagcaaaacagactcagccagaaaataataataagtgctgcaacgggaagcccccacagcagcaccgggtgttttatcgcggtcatttcacaacggtaagcggctgatggtggaagatttttaccgtgtcagcggcaatacgctctgcagcaaaaataccgcgcatccgcgcccaggtgttactgtcgaccgaagcaacctgctgcttctgcgcggcggttaacatctgccagagcggatcttgttgccagcgtttaacaatgctctcttcgcgatagtgggcaaccagcagccaggcaggattgaccgccagcagttgctccaggccgatggacggcatggacgcacccgccatcgcagcgggaacgttcagccccagagaggccagcacgctgccggtccaggtctcctgagtatgcaggttgaattgctgttcgcgtgatgtgccaaaggccacgcgtgtccctttgggaagctggctggcccactgcgccatcctctctttatgttgttccagacgtgcctgcatctctcgctttttacccaccatttcgccgatgatagccgcagattgcaaattttcagcgtaggtttcgttgcgggacttaagcagcagtaccggcgcgatttgctgcaaggcgatgtaaacccccgcatggcgactgctgtcggcaatgatcaggtctggtttcagagcggcaatggcttccaggctcggctgcgcgcgcgttccgacggactgccacggtttcaggtgcgcacgcacttcgggcaggatgcgttttgcatcgttatcgtcggcaataccgatcgggatgacgtccacggcggccagcgcatcggcgaacgagagttccagcaccacaatccgttgtggcgttttttcgagtgtaaacgtgccgtgttcgtcctgaaccgtggcggcaaaggcgtggctgatcaccagcagcaggcctgcaaaaagaaaacggataaatgccaacataatcacattccagctaaaagcccggcaagccgggcgttaacacatcagaacttcaacgacccctgcatatacagcgtgcgcggctggcctgcatagatgcctttgttgttgtcgtcataagagcggatgaagtagtcctggtcgaagatgtttttcacaccgaatgccaggttcagatctgccatctgcgggccaaagtcatacgccacgcgtgcgccccagagcatgaagccgggaatgcggccggtactgccgtcggcgctctctttcaccgtattggcgttatccgcaaactggctggactggaaatcgctgttcagattgaacgtccagtttcctggcttgtagtccacgcccagcgtgcctttatgtttcggggagaatggtaccagattgccgtaggtgtcgcctttctcgcggatttccgcgttcacatacgcatagctggcgtagatggaaacgttatcaagcgttggcgttagcgtacccagatcgtaacgtgcctgcgtttccagcccggtatggcgcgttttgccacgtgcagtgacggtgtcgttggtctggttggagtcgtactgattgttaaagttaatcaggaacagccccatttccgccgtcagcgcgccgtcgtcgtagcgggtaccgagttcccaggttcgcgctttttccggttcaacattgccgctttgcacagccttgccaatctggctgtactgtacggtgccgaacgagccttcagtgtttgcataaagattccagctgtcagtcaggtgatagagcacgttcaacgccggaagcggtgcgttatagctcacttcttcgtgcgtgcctgtgatggcgttgttctggtatgactcgatatgttcgaaacgcatacccggcgtgatggtccagttgccgatgtcgattttgtcatccagataccaggcgtgcgcctcggtgccggaacgcgtatcgcggtcgtaagggcttgagccggacggcaactgcccgctgctggtggcggtgtagtaacgcatttcatgcgttgattcattcaaatagcgatagcccacgcccacttcgtgcgcggaagggccgatcataaagatctggctgtagcgtggctcaataccgcgcacccagtagttacgcggcgagagggtgatgcgtttgccttgctccaggtagccgctgcgcagggtttgggtgtagaacccctgaatgttgaatttatgctggctgtctggctggaactggtagcccaggctcgccagcttgcgacgaccccagaagcggtcatacgggcgggtggattgccagcgatcggcgtcgtaatccgcgcgagacaggccaccgggcatgtcggcttcaccgtcgtaatattgcagcaggctgttgaaggtgtgcacctcatccggcgcatatttgcttttcagcatcaggtcgtcgatgcgggtggcgctgtgctcgcgccagtcactgccgcgcgtgccggagtagagcagcgcggtgccaaaaccgttgtccgctgtgccgcccaccatcaggttgtgcgtctctttcgggttgttttgtgaagaggttgggctgagctgaccttccacgcccgcctcgataccaaagtcctgcggaatggcacgggtaacaaagttcaccacgccgcccacgctctgcggtccgtaacgcaccgcaccaccaccgcgtaccacgtcaatggcatccatgttgccgagcgaaacgggagccagtgaaagctgcggctgaccgtaaggggcgaaggggacggggatgccgtccatcaggacggtcgagcggctggcgaggcgcgggttcaggccccggatgccaaagttcatcgccaggtcgtggctgccggtgccgttgttttccggcgcgctgacgccagggatgcggttaagtacctcacgcatggtggttgcgccggttttggcgaaatcctcacggcggatcacgtcacgcgcgccagcatgttcaaatacgtcgttttcacgcgcatcacccagccagtcgccgaccacggtcagggcatcttcttttggtgcgggcgcgggctccagcgtccagctgttatttcccagcggttttacctgcagtccgctgccgtccagcagttgttgcaggccgctctcgacgtcgtaatcgccgtgcaggccgttgctctgcttgccgcgcgtcaggctggcgtcaaccgagagggtaaatccgctgtgtgcggcatactgattgagcgctttatcgagcgatcccggtgcgatattaacctgtgcagcaaaagcggaaaacgagagaccggccagcggcagcaggctcaggcgaatggtgttaaccaaaggtgttgttttacgaaaaacgcgtaacggcgtcataccttccccatcatcatttttgttgtgttcagctatgagtcgaacgagaagggtaaaaaggacaatcgaaataagaattattttccttacagtggtgaaatgtttatccagtaccgcgtaatagactgaattttaacgggaagcgtttgcgcgataacgttcaggatcgcatcggtatttttcagcgggaacgtcccgctcaggcgcagcccggcaacggcgggatcgcagcgcagcacgccgttgcggtaacgggttagcgtggctatcacctcacccagcggtttatcgctgaagctcaggatgtccttcgtccagcttgtactctcgtcatccagcggtttcactgcgccaaactcagaggcgctgaactgcaggctttcaccagcgttcacgatgcgtttttgcgcgggggcactggcgagaagcacttccacagcgtgctgctgcacgtcaagctgcgtgaaattatcctgctggcggacggtaaattctgtccctaaagcagtgagctggccctgacgggtcaggacacggaaggggcgttgcagggcatctttcgcggtagtaatggcgatttcaccgtaccagagccggacggtgcgctgatgcgcatcaaaacgcacatccgccgcgctttgggtattcagcgtgagcagggagccatcttccagttgctgacggctgactgtgcctttggcggtgcggtaatctgcccgcagaccttcgccggtttccgactgccagagctgccagcctccgccagcgccgagcaacagcagtaatcctttcatcacgtgacggcgggtgaggcgggtatcgtgcaacgcccggctggcaacgtcgccaggcacaccgccaagctggttgcgcaggttttcaacctgctgccaggcccactggttatcctgatcctgttcataccactgttgccagcgcgcttcctgttgtgggctgacgcgctcgccgcttagcacggcataccagtgggaagctgaacgcagcgcctgacggcgggaatcggttaacaaaggattcataacccatactccagacggaacagcaggcagtgctcgacggctttcgccacgtattttttcacggagctgatggaaacaccgagtttgtgcgcaatctcgctgtatgtcagaccatccagttgcgaaagcagaaacgcttcacgtgttttgccgtttagcccgtccagcatgctgtcgaggagttgtagggtctcgagttggctttcgcgttcctcaggtgaaggcgctcccccctccggcataagcgccagcatctccagatacgctttttccagcgcgtttcggcgaaacaggtccaccatcacgcgtttggcgatagtgcagaggaaggagcgaggatcgcggatcgtcgagagcgtttcgctgaccattacccgcaaaaaagtgtcctgggcaatgtcatctgcatcaaaagcagactggagtttgcgcgtcagccagcttttcaaccagccgtgatgtgtgccataaagcgactcgaacgttaaggaagctgtggtagtggcgcggtcagacatgcggagtgcatcaaaagttaattatcacgtagtcatattaatatgagaatggttatcattacaattggaaataaaattgtttccaatagacatttttaacatgttgtttttctaagtgttataaggtaggtataaaatgggatggagcctctgcttctggcatgtgtcggtcagaatgactcatgatgtggtctgctattattgacatcctcactgccctaaaggatggggatttcggtaatgctgccaacttactgatttagtgtatgatggtgattttaaggtgcttgcgtggcttccatttccatcagatgtccttcctgctccgctactgaaggcgtggtgcgtaacggcaaaagcactgccggacatcagcgctatctctgctctccttgccgtaaaacatggcaactacagttcacttacaccgcctctcagcccggtaagcaccagaaaatcattgatatggccatgaatggcgtcggatgtcgcgccagtgcacgcattatgggcgttggcctcaacacggttttacgtcacttaaaaaactcaggccgcagtcggtaacctcgcgcatacaaccgggcagtgatgtgattgtctgcgctgaaatggacgaacagtggggctacgtcggtgctaaatcacgtcagcgctggctgttttacgcgtatgacaggatacggaggacggttgtggcgcacgtcttcggtgaacgcactctggccacactggagcgtcttctgagcctgctgtcggcctttgaggtcgtggtatagatgacggatggctggccgctgtatgaatcacgcctgaagggaaagctgcacgttatcagcaagcgttacactcagcgcattgagcgacataatctgaatctgagacaacatctggcaaggctgggacggaagttactgtcgttctcaaaatcggtggagttgcatgacaaggtcatcgggcattatctgaacataaaacactatcagtaagttggagtcattaccgaccatgtttatttcatacattgtgggtattgttcttattatcgccgctaatcaataaaatcctgccccatatctacatggggcagttgttcattcttttagtgtggtaattcacacgccagcaaaaactctgccgttccttcatcaacaatcaggtccgtgacatatcctcccagcagggcacccaacgttgcgtcatagcctctttccccaccagcaaggaagatcttccgttcaatctgccttagctgagccagactgattcccagaatacgctggtcaacatcagccacgacgggcatcccttccttgtcatagaagcgaccacaaatgacacctactgcgcctaaatcccgatacgtctgcatttccttcttattcagcacgcccacccgaatcaggggattttcatcaagcgcgttacccacgacaaaaaaggctttcgtacagcgagtcagaacgtcaaaattcgatcgaataataggctctgcctgtaactccatggccagtctggcgcttgataccacggcgggcacgtgcagcgaggcgacacggcctgaaagcttgtaggcgatttgcgatgaggattcaatgatcgtcaggtctggctgagatggcatggaaccgagcatctgtataacggtgacatttttacatgacttcggcgtcatggttttgctcatctgatggattgttcttccccaggcaacccccagcacatcaccattctcaatcacctgattcagatacatgccaccggcacgtgaaaggcgagtccgcatcagctttgtatcatcacgttttccggcatgttcgccatccggcacgatgatcactctctggagattgaatttatcgcgaatttgcaaagcagcgtcgatagagccaaagacattcacatccaggttgatatgaaccagtccattttcccgggctgtttgcaggtatttgacaaccgtgacgcgggacacccccatgatagctgcaacttcagtctggcttttgccttcctgatagtacagccatgttgcatgaagtacgggatcatcattgaacaggctgctgtttgtttgatctctatccacttttgtatacctgtattaaaccggggaaatgctcatcttaaccctgtttacccggagagttgatgcagattgccagtggcatgattttatacagatattttattcttttacatgaaataaaccagcataccatttgagcgatcgcccgctgttcccccatactgtaaagccggagacatgctccggctttacagtattactgagaatacacccatcaagcataatcgaaggttcaatatcgcccctttttgatcgccagcgattcgtcaccgtgcagacggttgccgtcactcactaaattatgggggacagtgaacaacaggttggctcactggcaagaacccgattataaaactaagctggcgagcagaataaaaatcagcccactgatggataagagtgtggacatcagcgtccaggataacagcgtttctttggtggtcaggccaaaaaagtctttaatcatccagaaactggcatcgttaacgtgagaacaaatacaggatccggcaccggtagccagcgtaatcaaggccaggttggtattgggatgtactgccaacaatgggatgaccagaccggcggtagagatcgccgcgacggtggctgaacccagacaaatacgcaggaatgcggccacgccccaggccatcaggatcgggttaatatccatacccgaaaccagggtggaaatatactgaccaacgccagagtcgatgagaacttgcttgaatgcaccaccaccaccgataatcagcagcagaccggcaatacccgcgatagcttttccgcaagaatccatcaggtcagggattgttttcccgcgccccaggcccatggtatagatcgcgaatagcagtgaaatcagcatggcgatcgttgaattacctaagaacagtatcacgttgtaaaataagcctgaatccgcggcacttttggcatgagtcatctggatgatggtgacaaccgccatcaggatcaccggcagcattgccgtgagaaaactgatcccaaagcctggcatttcgctttcgctgaatcggcgggtcgcgccgagagaggctatattcccctcttttttaaaggcgtccggaataatgcgctggcagaatttattcaataccgggccgcaaagaataaaggttggaatgccgacaatgataccgtatatcagtaccaatcctacatcagcgccatattccctggcgataacagtcgggccggggtgcggcggcaaaaaaccgtgtgcgaccagcaaaccagaaagcatcggcacacacataaacatcggtgatatttttgcttcacgggcaatagcgaataaaataggtaccagaagaattaaaccgacttcgaaaaaaagtgcgataccgacaataaacgccgaacagaccactgcccagtcaagtttatttttcccgaaataattcagcatggtcagcgctattcgctgcgcaccacccgcatcggccagcaagcgaccgagcataacaccgaagccaaatatcaaaccaatatggcccagcgtaccgccaagtccggattcgactgaggtgacgactttactcaaatccataccactggcgatggcgacagcaatcgagacaataattaacgaaacaaacgtattaagcttaatttttatggttaaaagcaggagtaaagcaatccctgccacaacgataattagtggcataacgtcctctcataacagggtagcgacccatcattatccgactgagcaaataacgaatgatgcagagtcggataattcaggtgtctggatgtttttatttatgctttcagtttttattcataaaatcgcgcaaagccgcgccaattttgtttacatcataaatacaaccggtccatgtcccaccactcacggcctgaagcattgcccatagccgggtatcatctggcaattcaggatcgggaagtaaatcctgatggctgggtctggcatttaatattgcagttgcctcctcctgtgaaggtaattgttcatcgctacgggttccgaggaaattgacttcgccgtgaagctcgcgacaatcaattttaatttcaattaaatccccggtgcgtaatttaccgatggggcctccggccagcgcttctggccccacatggccgatgcacgcgccagtagaaacgcccgagaaacgtgcatcggtgattaacgaaacatgcttaccgtatgacagatgcttcagggcactggtaacctggtaggtttcttccatccctgtacctgaaggtccaacgccaataatgaccagaatatcgcccgccttgatcttgtcatgtttgatatcgtaaatcgcacttttctcggacagataaaccttcgccacacctttatggtaatagataccttgctcatcaatcatcgaggggtcaatggcggtggatttgatcaccgaaccttctggcgcaatattgcccaccgggaaggtgatagttgaggttaatccgcgcgcttttgcttgctgcggagacatgatcacttcgtcagcgttgatttgttcctgatcgagcaggagttgcttgaaccgctgacgccgttcggagtgctcccaccagtcgaggttttctttcagcgtgctgccggtaaccgtcataacgtcttcatgcaacaatccgaggctgcgcagatgcaacatgacttccggcacaccacctgccataaaggcattgaccgttggatgataaaccgggccattaggcagtacgctcaccagtcggggcacgcgcttgttgatgcggatccagtcatcaacggtcgggatatggcaacctgcctggtgagcaattgccgggatgtgtaacagcaggtttgttgaaccaccgaacgcggcatggaccgtcatcgcattctctatcgctttatcggtgagaatttcccgggtggtgatgcctttttgactcaggttcagcgcagctcgcgcggaagctctggcgatctcccgccacacaggctcaccggaaggggccagggctgaatgtgggattgccagtcccaatccttcggccaccacctgagatgtcccggcagtgcccaaaaattgacagccgccgccggaagaggcacaggctttacagcccgcacggcgtgcgtcctgtagagataattcgccattggcgaagcgtgcgccaatggtttgcaccttgccgttgtcttctccatcctttgcgggcagcgtcgcgccgccggggaccagcacggttgcgatgttgtgctgcgcggcgagtgccatcatggtggccggaagccccttatcgcaactcgccacaccaataactgctttcgcgtcgggcagagagcgaataaggcggcgcattaccatcgatgcgtcatttcggtatggtagcgaatcaaacatccccgttgtaccctgagtacgcccgtcacaaggatcggagacgtacacggcatagggcagggcatggttggctttaataacctcggccgccgctttcatctggatgtccagttcgtaatgcccctggtgcaacgccagcgccacgggtttaccgtctgcgccgcgtaagccaccgagtgtactgagcagtaaaataccgtcccgatccagctcgtccggagaccaacccattccggcattcatggtcataccgaacagatccccgctcgggcggttgataagcatctctgcggttaatgggagttcgccgtccgggccatcggcgtgcgttctgacggtgtaaatatcgtggctctcgtcagcaaaaatattgcgaacagacatgagtttctcctcagactggtaaaatgccctgcgcggtaagcagcacgtggactttatcttttgcttcttcagatgcttcaagaatcggtggtaagcaatatgtctctacaggcagcccgacacactgcatgctgtatttgatcagtgagacaaacggtgtttcgagggcgtaaatagcgggcagttgtagtagttttttattcagcgtcgcagcggtcgccagatcgccttcacgccaggcgcggtagatgccgacggagagttccggagcaaagttagcgctggcggttatcgcaccgtcgccgcccagcagcatcgtattcagcaaatgatcatcgtaaccgcagaataccgaaaacgacgggcgtaccgacttaactgtgttgatcatcgtacgcaagtgaccaacgctgtcgatggtgtctttgatgccaacgatattctcgttttgcagagccagacgcgtcacggtttccggggttaagtcctgacccgtcagatccggaaagttgtacaggatcaccggtagggtgacgctacgggcgatctgctggtaatagtcgtcaagatttcgtggtgcgactttccagtagtaggggttgatggcgacgataccatcagcgccgtaggcttgcgcatgctgcgccagtttgaccgcttcgtcagtggaaggggaaccgacgccaatcaataccggcactcgcccgtcgacaatggttacagcttcttcggcgagtgccatgcgctgggctgtattcatttggctaaattcaccaccggtacccagataaaacagcccgtcgacccctttattaatcaggaagtcggcaacttcgcgcattgcctttttatcaagggttccgtcacgatgaaacgtgctggataccggtggaataatgccgctgaattttttcattacctcagtttccttttcgtaagtgctcattttcgtttctgtatcccagcccatatgatatttgctcagcgcatttccggagcaattccagatagctgtctatcttatttcctgaataaactaccggatcgccagaaagtgagattgcatagttaactctgttatacatattgaataccggcatacttaaacataccgccccataggttgattcttcgttgtctatggcccatccccgaaggcgtgttttttgtaattcttccagaaacaattttttatcggtaaatgtattgcgcgtatgtggagttaacgtgagtgcttctaaaaaataatccagttcttctcgtgtcttccaggctaataatgccttacccaacgcggtaatatgcaactcaagttttttgccaatccagcttttgctcgtcggtacagagtccggactttcgatcttgtcgagatagatagccgaaatgctctccatcgccccaagatgacaaaccagtccacttttcagcgacaactcctgcattggccgcttagtcacctcaaatatattttgacggtgtaacgcctgacaacccaattcgtagttttttattcccagtgaatagtagccgtttttgtttttaattaagaaaccacaatccaccattacattcaataaattaagcaggctgcttttggggtactggaatttatttaataactccatataacttgccataccaacccatgcaatgtgggttaatattttttcagcacggactaatgaattacaccctttgcgaaccataatggctcctccttgctcatggaataaatggtatcggcattacatagtggaaaatatgctttgttcagcatgctgaaccgtaatgatgtgattaaatgtgatcttgtacacactttgaataatgaatccagaacagccacatttagtgaatgagaataaaaagtagatggcgtgttgttgcaacatcgtagtgtgtggattgcgcctagagcttctttattcgttcgagcgcatcgccaatattttctattgggtgccattgattatttttgcttgaaatccctctcgaatgaacttacttatcactttattgaatgaggtaaaaacaactgacatccggctcgctgataacgctgtgcaatagtctcaggtaacccgctgtcactgatgatcgttttaatacatgatagtgttgctacagcatgcggctcaacggcatcaaattttgagtgatcggccatgagaataacttcacgcgagcgttgaataatccgtgttttcaccccgacctcaaacatggtggcattggtgatccccgtctccagcgacagcgcatcgcaggagataaacgcacgttctacggaaaaggcattgatcatctccagcgccagactctctcctaccgaaaaataacctgggcgaatcagtcctccgataatgtaactttccacatggggaaaacagcccagttcattggcgattttaatgtcgttgcagatgacctttacccgcgcatcggccaggcatttcgccagttcgaggcaggttgagccggagtcgagaaaaaagcagtcgccatctttgatcattgttcgggcaagggcagctatttctcttttcgccacagattgcaatgtacgtttcacgtcgaagacgtactctttgtcgtctgtactgtcgtcgaagtccaggcaaccgtgaccgcggatcatgcctggatactggttgacaatatactggaaatcacgacggacagtcgcttccgcatagccaaaaagctccatggcctgctgtgtggagaggtgacgatgttgccacaggtagtgcagcatctgtttgatacggtcaggtctctgttggctcatcagaaacaatctcctcttacagggtggcgaattgagctaaggtcgcgcgatagtcagatgaagagaacagggcgcgcccaatcaccatatgttgcgccccagctgctgccagttgctgtgcagctgccagcgtaattccaccgtcggcccagcactcggtctgaggaaaagccgtgcgtactttttggattttctcgcacatggagggaataaaccgctgtccctgcccatcgggctcactggtcatcaccatcactccgtccagctcagacgccagatatcgccaggcgtcgatcggggttgccggattaaataccagtccggctcgtgcgccggtatggcggatctcagttaacgtttccgaaggatagtccagcgtttctgcatgaacgaagatccacgcgggtctgatttcagccagcgcgttaaaccagcgctgtggccgggcaagcatgaaatgaaaggacaagggatgaggcgtctgtctggcgacggcctgcaccgttttcatcccaaacgtaatgttgttaatgaagctgctgtcctcaatatccagatgcaggctcccaaaatccagattgtccaatgccgtcagctcacgaccatagtgcagaggatttgcgctggcgagagaagggtgcaggatcataagcgcctccgttaacctgataccagcgcaaacagtgcatcgtctgtgctggcatttcccactgccgttaagcgttgtggcgaatcaataaactggctgatgcgctgaatggtcaaaatatgtgcgttggcatccgtggcgctgacgcagagaagcagccagacggggtcgcactcctcgttaccaaaggcgaccggggtgcgtagcgtggtgatactgacctgattatagtttgcgccttgctctggtcgggcgtgaggcaaggcgattcctggggctatcagataataaggcccccagttaagggtattttcgatgatcccattaacgtagcatggctgcgcggcaccataggctaccagcgggcgggtggcgatttccacggcctgacgccagtcggtggctttacgttgtgcctgtacccatttaatatcgttaatcatccgtcgttgactccatgccgattcgggttaatctggtagcgatccccgtcgatacttttgacgaaggcggcagggatcgcagaagggttattgctctttgccggggataagcgctctgcttatccccatcttatcggcgtatatgatgcactttctccataaactgactgactcgcgcctggtcaacgaaattggcaaaaacgccgtcctttttaaaggtggttgcggtcacacagccatcggcgatactgagttgttcctccacgttttccaggcagacgcccgtgttggccaacacgacggtgtcaggcaccgtttctttgacccgttttaacagcgcgctgtcggtacgcgtcccggcggtcaggccagaaacacagagcgcatcaggatggttgttaaatactgtcgatttagcaatagaacagatatcgcgattgcccagatacacggcggcctctgggacgatattgaacaaggttttcacttcgcctgcaccaatccggtgttgatgacggatggtctcaccgacgttagtgtcccagacgccaaagtcgctggcataggcaccggtaaatatctcgcggataaacttagcgccggtagccatcgccaggtcgaatgaggcgaccggatcccacagaacattcacgccaaacgggatgcggatatcgctcattaattgcccgatgattcgtgccattgccgcagtggtttccggacgcaccttcgtgagatagggaagactaaactcgttggagaacatgactgcatccaccccaccattttggagcgccatcagatcgtcccaggctttgtcgataacccagttcatccccaactgcgcatcaaaactcgggtcgccgggcaatgcacgtagatggcacatggcgatgaccgctttttccgtcccaataacctctttcagccaactcattgaaagtactccttattccgataattcacgtttacgtaagaacagcacgacgctggcgacaataccgaccgccacgacaacgccaataatcccaagcgacatcaattcagaaatcgaccaaccgaacatattgcccacggacaacgctgagatttgcgcactttcaccggcaaaactgaaaccgcctttgagcgccatttcagtgaagtaaggcgcgaactgggtggcgatcagcaggacggtaatcatcacgatgaccccgcttatcaacgtcctgaccaggtctccgcggtggataaccgtagccatacagataaagaacggtgctaccggcaggtctgcgaggggtaacactttgttgcccggtaaaatgctggccagaattaacataatgggtatcagtagcagaccgacagcaatggtggttggatgccccagcgtcacagcagtatccagaccgatatacacttcacgtcctttgaaatatttctggaagaactttcttgcaccgtcggagatgggcagcaggccctcaacaatcaggcggatcatgcgcgggaacaacaccatgattgccgcaacggtaatcatcagactggcgcaacctttaaagccttcaccagccgccaggccaaaaatcagaccgagcactacgccgataatcaccggatcgccgaccatgccgtagcgtttctggatctcctgagcatcgatattgcgtcccttcatgaaagggattttttcatagatagcatcaagtagaacgaaaagcggtactgaactggaaccgtagccttgcggtatcgaaataccttccagcccgacgatgttctgtacccgttttgccgtccagtcggccatttttaacgatagcgccgcatggcagattgcccccagcacaccataaatcaggctaccggtcataagctggaccaccgtacccgtaatggcgtagtgccagtaattgtaaatatcgacgttcatcgttttggtcagacgggtgaccagcatggcgacattgagaagaaaaataactgggataatcatggcgccaatggctgtcgcataaccaacgccggaggcagggcctgcgccaacgtcaaagacatgcagggctaggccgaaacgctcaatcatcactttgatagggggactgaggctgtcgatcgccatgacgatcaccagtcccataccgacaaaaccaatcccaaccgttacccctgccttaatcgcctgcagccaggggatgcggaagataaggccaatcacgatcatgatgatagggacgaaaacggtaccgccgagagacaggatgtaatcaaacataatgcctccttttattgagttaacagagccttgatttgttgttttaacgcgtcgtcgttgatccctgtgagcagggcggcgccattaagcgtagggatgccgtaatcactgttggttcgcatggaggttacaataaggtccataccgttacagttaagagggatctcattcagacagcattgggcggtagtggctgaaatgccctgttcagtcaggaactcttgcagcttgtgtgcaatcatggttgaagtcgacatgccggtaccgcatgccacaaggatctttttcataatggatgtgcctcttgtgtagtgcctgaatcaggctcaacggggaaatgtgctgctgacatacctgccagagcggtcaataggcggatgcaatcagtcaaatcacgcaggctggcaacctccgccggagaatgggtatagcgacaaggaatagagagactggcgcagggaataccatcctgctcaacctggatataaccggtttctgttatcacgccgggagccacttctcgctgcaccggaatgttgtgttcaagagccgtctgttccaacatccgtatcaggcgaggaggcgtgattaatccggccagcgttccccgaccatggtagttcaggcaggtgatcccaacgccctgattaatcctgacctcggaataatcgtgtaaatcaggggtgtcacacgatggagtgatatcaataccaatcgccaggtcaggttttacacggcgtaatacgggaacaatgccgcggatattaaattcttcctgtaccgaagccaccagataaacggcgatatcaagctccatagtactgatagcatccgctacaccgagcagggcagtacagcctagacgatcgtctagtgctttactgcacaccagatcgtttgccaggagttgcggcgggttatacagagtgacaggcgtaccgacctgaatgcccatccgtatagcgtcgtctttgtctttggcaccaatatcaatccacagtttgtcgacagaaggtgactgcgtgcgctcgtcgcctttggcaaagtggtaggacttaatgccgatacaccccatgactggccctttgtccccggtgagggtgacgatggaaccagccatagtgacctgcgcaggaccgcctacgcgttcaaagcgtaaaaatccagacggctctattttgcgcaccataaaaccgacttcatccatatgcgcaaaaatcatcagtcgcagcgcatcgggtttatcactaccgtagcgcgcgacgacattcccaagcctgtctcgccagacctcttttgcctgacgcctgaattcgcacagcatgacgtcagcgacagcgttttcgtgtcctgaaatcgcattgtgctgcaaaagcgagaacagggtttcctgcacagaaaatgacatagctatctccgtagaccgtaaaacaatcactcgttgagcgttttataggcgcagactggtcgaataattgtgagaacgttcacgtgaaaacgcgcaaagctgaacaaataaaaaattatgtgagccgagtggaataaaagcgctcaacgtttgtgaaagttacgggctggagagaccagtgattatggttgaaataatgaggatgaataaaacgcggtaactgttatagcaccactttgttgcaggacgctccctcttcattacgtcctgcacgtggataccccagcatctccatcagcggatcttagaatgtaatggcgcgtggcaggtcgttggttcccagcataatgtaagaaaacatcggatctcctgaatagattcagagggagtatagataatcagctcaaatcactctccgctttatgagcccaggctggcattgccgtcagataacgttttgcacgcttatgtgcttcctccgggccgactttttgccaggaatcaaggaagctggctaaacctgataccgcttcttcccagggtttgagattgccgttgctgtcgctgcattacgcacaatattgatcactggcactgtgtgcatctggtgccgacatcggcattccgcaagcctgacagaactgttcatgttgtgacatatgatgctccttatggtgacatcttgattaataaacatactgaatatgtattgtgcaggtgatacatcagatcaaagcaaaggtaaagcctcgatatttccagccagaaataccgggaacctgttgttaccgggcgatgagtgcgaacacgccccagccaaagcattcccgcgcgtaggtcacgtagcgtttcggcgcgatgtttagttcggccctgacttcggcggcgaagtcatcgtcaggattcgcttccagccagcggcgcatggtcagccattttgcggcttcataccggtcccagccttcctggtctgccagtaccatttccaccacgtcatagccgagatcgtcgaacgctccgacaagtcctggcagcgtcaggaaatcgcttgtcgagctgacgccgcaggcctgggctatttcttctgttgctggtagctgacgccagtagggttcgccgataagcatgatcccgcccggtttcaggctttgcgctagcagctcctccgccccggcaaacccaccggcaatccatgtcgcgccgacgcaggccgccacgtcacatttttcatttgcgacgtaaccggccgcatcgttatgaataaaatgtacgcgttcgctgacgccgagttcttccgcgcgacgctttgcctgcgcggtgaagagcgaactcatgtcgatgccagtccccgtaatgccatgatccctggcccaggtgcagagcatctcgcccgagccgctgccgaggtcaagaatgcgggtgcccggcttcatgcgcagcacgcgacccagcgtggcgtacttctcttcggtgaacgggttatggatgcggtgttcactttcgctgatggtaaaaatacgtgggatatccattatttaattcctgttattgggttaagccttaaaaaggacacaacaagattgttattcacgtcagtgctccggtttcatcagggtctgcgcaccggatgtggccggtcagggtcatgggctgagcggtgagtgattgcatcatccagcaggctttgtgctcctccgggatgggataaggtgccggatagcctttgtctccggcacagggttcgaacccatgtcgggggtaataggtggcgtggccgagaacaaaaaccgtctggcagcccatcaacctcaggtgctcgatgccagtgcgtatcaaccgtcctcccacgcccatcccttggtattccggtatgaccgccaggggagcgaggatgtgcatcaacggtgaatccatttctcctttgaaggttgcccgggtaaataaaatatgcccgacggctttgccttcataccgggctagcagcgataacgcggggcgcgcgctttcatcctcaagtaaagaggccactaaatcggcttctttgctgaagccaaatgcgcgggtttcgacttcccggatatcactggcatcacttttatctgtgatatgaaaagtgaagtggtgtactgtcatagaaactctccttagcgattatcgagctgagcgcgaactttattcagctcggtggtgttgattcgatagggctggccattgacggacttgataagttttttggttttgagttttttgaagacggcgagcgtgcagtcggtcagcaacagcccttcgcggctgtagcattcaacggaagtgacgcggcctgaagaatcgcggacgtgcgcaatacgtctacctttagcgagaacgtgtaaggtatgttgttcctgacgggataaattcatactgaagaacctatttaatcatcatgtgcaaaacgtgcaaacacaccgcggtgtccgcattcgatttcggcgcattgataatcagtccggcctgaaaaggtcggggaactgattatcggatgattacattctccagcatcaaagcctcgggttgagttgaaaggtatttacggagcgaatattaacacgtagttataggagggatatgtttcagtagaaaaagtgtgatgtactttggaaattgaatgccaacccatttactggaaaaggcagatgacactgacgaatgcatgttgaagtacgcctgaaatggcctcatcggcttttcccttcgggagattattctccttttgttaaatccagaacataaatatgctcacccatcttcgatgcttgaaaaattgaagccaatcctgataagtaatttttttgaaagggtattttccggattcacaccggctttgatgagtgaaaaaccgttctcttttattcagtcaatcgtggcggtaattgcttcaattgcatatccctggcgagcataagcgggactgatggtatagccgagccaaaacacatcgcattgctgacgtaaatagatatcaccaatcaaaacctgcgtcatttgttgacaatggccaattgaatatcgcgagcaagtgtaagaactcccagcaagaccctgtaaataattctgtgtaactgcccacgattaaaggtggccgctcaggcggtcaccgtattcgataataaatgggtctggaaaaagtgcagcatctggcagcgtaatgcaggtagcccagttcaactctcactaccagtatgatcccaagttcgagcgcggaatgtatctgtatgagcatcgtcgctgtttcaataacatcatcgactactgtaactcactttgctatcacggtaagttgcagcctaaaagagggatggaaaaaggacgattttccccgcaatgggatatttacatattgatggtagaggcatgaagccaaatggagggagccgtcataaccctcttgaagctgaaacaatagcagcatggctggtggcacataaggatgatatagagcgccattacggggaaccactgtacaaagttgttggtgttgtgacgccattttcggcgcaggttaatgctatcaaaatgtcattgcgtaagctggaaattaatggcaaagacgagcagggtttactgacagtggggactgtgcactccttgcagggggcggaaagggcgattgttctcttttctcctgtctactcaaaacatgaagatggcaggtttcttgatagcaacagcactatcctcaatgttgctgtctcacgcgctaaagatagttttctggtatttggcgatatggaccttatcgagatgcagcccgcattttcgccgcgagggttattggcaaaatatctcttttcttcagataataatgcgttgcaatttgagtttcagaaacgacaggatttaatttccgcacatacacaaatttcaacgctgcatggtgtggagcagcatgatgaatttttgaacaagactcttgccggagctcaaaagaaaataacgattatttccccttggttatcctggcaaaaagtggagcaaacgggatttctggcatcaatggctttggcccgttcccggggcattgatattaccgtggtgacggataaaaactgcaatatagcgcatgtcgatgatgataagcgtcaggagaaacaacatctgctgaatgatgctgttgaaaagctcaataagatgggtatcgctacgaaattggttaatcgtgttcacagcaaaattgtgattgaggatgaagaactgctgtgtgtcggatcttttaactggttcagtgctacacgggaagataagtatcaacgatacgatacgtctttggtgtaccgtggtgaaggcgtaaaaaatgaaataaaggcaatatatggtagtctggatcaacgtcagctttaaatgtgatgagccgttcatgatacaggagtagtaaagggcatattttaccaatgttaaggcgactttccgttttattgcgagtcgcctttcctgattataaatcttattgtttacctaatcattttcctttgcataatgcgcctgggattaatggcgggtgcttttaggaatgaaagaaaatgcaagcaataatataataatggcctaatttctttgaacatcattaagcatatcatcatcgtctatttgccagaatccgtcgacttataatcgccagaacggcatatcaggacggtgctgcgaacgctgtggcccaaaacgttccagtaaactgtgtagatgttcgtagatttccgagccataatcgaaaaggcgcggatgtctattaaggcatccggctaatctgtaagcaataacaacggtttatgcggtgcgcgtttttcacccttgtgccagattattatattggcaattgcctgctgttcgagcccgcaagtgaagagatattaccttgatctcatttgttttttgttgtctactctgagaacgaacaaggacatcccccatgaataaactccccgctcacctttcgcgccaaaactgcaaaattgcttctacaaatctgtcagaaataatcccccgacgggctgcagtgctgaaatgactgcttcgcagtgccgtcgtccagttctccggtgaccggtacgctgaaccgtaatatcccgtgcttaaatcgtccgggtcttcatcaggcgcgttcgtcagtcctctttcaccttgttgctggaagtcgacgaaaataatattggctaaaacattattttgataattgccataaatagcttcatacgaatgcgggaaattttctttccagtaccaggtggtatcgccgcaaaaccacggcgcgtcagtaatattattaagctgagaatggtattgttttagatccctacgaaaggcttcaaccatatgattaaagtgttgagggtgtgacgcgtagtcactggtcattaagtcaaattcgccttgcatccagcatgcgccgaggaatttgttctgcggattttttgccagtgcggctcgcgttctgctgactaaatcctggtacagcggagtatccgttccccaacgacaagcatcatggctggctccgtgccgttctgaatatgtcccttcgctgcccgcggtaaaagccgatccgccacggcaacacggaacgataagaatccctgcattatcaggaatgaagggcagtaatttccgtgcaatatgcagtgcctggccaacggtgccgtactgtgtttgatgattcgttgccagaggatggtgataaccctgcatatcctgaacatcgtgtgggcagtgagtcagtggaataatgtcgttaaagtgacatggcgggcctccgggatgcgtatgcgcaaatctcgctaattgtttaattctgggatgaggcgcatcttccctgtccggtaatggcagtccttcgccatacgccatggcattagactgaccagcaacggtaagaacatagtaataatcgggcgatattattgcgttcatataaatttcgcgtaattgaaatgacaaattgatagcagggcccctttaccggggccctgaagcgttagttttgtactgtgactttattatccttcacagtgatcaaaactgaatccgtcaccgctttgccgcctgcagtttcaccgccaataatcaatagactattattccagggcaatgatactccgtaggcccgaccttgcgataattcacccgatttatcccatttcccgttatgccaaagatgaatatcagtgctatatgattttttcaggccttcatgcgcatagttcttaccgttctggtaattttctcgtgaacctttgaatccggcccctccggcaaatataagagaatcattgcttatccccgcaaaaccgccagctacgccatctggtgatgagacgggagcaagcttattccattttaaattattaccggtgaaatcaagttcaaatacggcatccgttcgcaatcctggtttggcttcgccattaataagccaggttttatcacctttattcacaaccgccgcaccagccgttccgtaccagggcgattcgccagcgtaactccattgctgtgttgagggatcaaaagacaacagaaacttattgaagaaataatcttctgcttttttgtcaaaatagtgagcattgattttatctatagcggttgaatcttttccagcctcgttgagatcttcaaaatagccattgaagatattctggttaacaccaccagtaacataagccttgccgttgtgtacaaaagtcacatggcccgccatgcccatcggcgcgtgcgacatcaatttaacccaactattggttttggggttgtatttgtgtacgtcattaaatacctgagtcaagccctcgctgtttttgccaatgccgccaaacacatacagattgccatcaataaatgcagaggttgcttgatctcttggtccgccagggaatgcagctaacgctgtccattttttatctttggcctgtgtatccagcttgtaccatgccgtacctgcgctacctaaaccaatgtagacagtgtcgttatcaattgctccggtaccacttttaaatggcacaggagtttccggtaatacagacgcgtttgcggcaaatgaagccatcatgatagcaagcgccgttattgttttattcattgtgactgtctcctgtctactacagtttaaatgacacaccaatgcgataactgttttccgataaattatctctgccgttgtaaacaccctgacggtcaaggtagtcatattctatgtatggcgtaatatcgggcgtcatatggtattgtagaacaaatgcattttccgtcgcccatttcttatggtttgcatagcgataatcgttctgtttgctgtatagcgtcgtttgccatgcgaaggtgaaatcactattaatatggtaagtgacatatccatcccaacgatgaacgttatcacgagacatatcaccggataagtcttgttgtcggtaagctttccagtcgtaacgatagcgaatgccaaaattaagatcttttgtcgcgtcccaggacagttttacgtagggtccgtagcgtgtgccgttgctgctaaaatgcgttaacattcccgggcgcaccgtccattgatcatcaagtttaatcgcgtaattaacttcaacctgaacatcattgagtgcggcattttcctttttattatcatgaatggtattccaggtattactttccatgcttgcccaccatccattttgccatccctcactgactttgagtcgagtctcataggcgtggcttccactacgatatccaccacgtacgtccagtgtcgcagcctgagaaattaatggggacgaaaagcacagtaataatacgccagaaagtattttagcctttttcataaatttcactcatttgtaggatacagaaagcaatacaaagcccgcataaacaattagcatttatgttgtgtaatatttttttgccaggcttatagtgtctttggcaaccggtagctgtattttatatttttttgtataaggtctcctgtgaaaaatctcttttcacattatttaaataaacagagatccagattaaatacctgagtataaaatctcttctgatgtttaattgatttgaatgttcgtaagctatatcacttactcaatccattttacccagagtcataaaatagaatgtctgttgatctcattttcatattcctttcagactgaagtgcgttttcatcacccgatgagaaagaactgaagtgatgtttgccatagattgcgagatgccctgtctcattgactatcttggtgcacctttatacctgttataccagatcaaaaatcacgcaatccatacaacaaaaccagatttgcaattcgtgtcacaaaatatgtcgatctttttctaagaggaagatgccatgtgaagccagacgaacacttgcggtggtcttcaaaaactaaagatcttagtttaactatttgttttataaataatttattaagagtctaaacaaggggagctttgcaagctaactcagtgagcttggtgaaaatcagtgtttacccgccatcaggctgagcataattctcatcatgaaatatgtttcctggtttgtggcttgtaactggtcacttctgaagtcgatctggagaggcttgttgatgttggtgttttcaggatgatgtttcacttagtttgtttgccgtatcgcccggcgaatggctgtgattgaggaaggtttaagtcgtagtgaccaaagctatatttaccaacgaatgtagatgaaaaaatcatctcctgcgttcccccatatctctaggataaaaaggaatgtaacaatctcatggcgtaagctgacgaatcagcaggaataatcgctagggacctaagaattagcatgataatagccactaagaaattactgcgctccatgaaatagccattttgtggcaaatggagttgactaataatgtcatatgtgagacggctagttgaacgaatattaaattttgctgaattttttatgttgattttacttgttacagaacatatcacatgatatatagataagattagttgcattaatgatgagggttattattagattcgtatccgattgataaatatataaaggtacatagcatgcaagagcatggcgtttgtatggcaacgttattataattaacagttgctactccatttaagttcactcagaagaactggtccacttacgttagttattaagcaaacgttcgcttttataaacataatcaggataaaaatgttggattattgctaacccagcacagctagtgcgcgtctgtaattataagggaaaaacgatgaagaataaggctgataacaaaaaaaggaacttcctgacccatagtgaaatcgaatcactccttaaagcagcaaataccgggcctcatgcagcacgtaattattgtctgactttgctttgttttattcatggtttccgggcgagtgaaatttgtcgattgaggatttcggatattgatcttaaggcaaagtgtatatatatccatcgattaaaaaaaggcttttcaacaacgcacccgctattgaataaagaagttcaggctttaaaaaactggttgagtatccgtacttcgtacccgcatgctgagagcgagtgggtatttttatcacgtaaggggaatccgctttctcggcaacagttttaccatattatctcgacttccggtggtaatgccgggttgtcactggagattcatccgcacatgttacgccattcgtgtggttttgctttggcgaatatgggaatagatacgcgacttatccaggattatcttgggcatcgcaatattcgtcatactgtctggtataccgccagcaatgcagggcgtttttacggcatctgggatagagccagaggacgacagcgtcacgctgttttatagagatagttgagataccagggatggtgttaaaaactacattattcttacgatatatcaaaaatgattaaccatttattaattgatgttattgtaagtgtgattcttaattatcataataaacattaagttaaccatatccatacaaaatacaatggtttatgttcttcaaaataaataaacaaaatcattcataaatttacacatcacttaaaatctcctgtttccgcacttttttctttattttttaagcaactggaagttaatccactgcaatctattgttatattgaatcaaatcaatgaaaatagatgttgtcacatcagtgatattttatttttgtatgatatttaatgtaattgactgatagccacatcactccgtgtgtggttatctttttatctattgggctaattttgaccgattgaggtttcctataggtattcattcaaatatatctcagttaggagtactactattgtgagtaaacgtcgttatcttaccggtaaagaagttcaggccatgatgcaggcggtttgttacggggcaacgggagccagagattattgtcttattctgttggcatatcggcatgggatgcgtattagtgaactgcttgatctgcattatcaggaccttgaccttaatgaaggtagaataaatattcgccgactgaagaacggattttctaccgttcacccgttacgttttgatgagcgtgaagccgtggaacgctggacccaggaacgtgctaactggaaaggcgctgaccggactgacgctatatttatttctcgccgcgggagtcggctttctcgccagcaggcctatcgcattattcgcgatgccggtattgaagctggaaccgtaacgcagactcatcctcatatgttaaggcatgcttgcggttatgaattggcggagcgtggtgcagatactcgtttaattcaggattatctcgggcatcgaaatattcgccatactgtgcgttataccgccagtaatgctgctcgttttgccggattatgggaaagaaataatctcataaacgaaaaattaaaaagagaagaggtttgatttaacttattgataataaagttaaaaaaacaaataaatacaagacaattggggccaaactgtccatatcataaataagttacgtattttttctcaagcataaaaatattaaaaaacgacaaaaagcatctaactgtttgatatgtaaattatttctattgtaaattaatttcacatcacctccgctatatgtaaagctaacgtttctgtggctcgacgcatcttcctcattcttctctccaaaaaccacctcatgcaatataaacatctataaataaagataacaatagaatattaagccaacaaataaactgaaaaagtttgtccgcgatgctttcctctatgagtcaaaatggccccaaatgtttcatcttttgggggaaaactgtgcagtgttggcagtcaaactcgtttacaaaacaaagtgtacagaacgactgcccatgtcgatttagaaatagttttttgaaaggaaagcagcatgaaaattaaaactctggcaatcgttgttctgtcggctctgtccctcagttctacagcggctctggccgctgccacgacggttaatggtgggaccgttcactttaaaggggaagttgttaacgccgcttgcgcagttgatgcaggctctgttgatcaaaccgttcagttaggacaggttcgtaccgcatcgctggcacaggaaggagcaaccagttctgctgtcggttttaacattcagctgaatgattgcgataccaatgttgcatctaaagccgctgttgcctttttaggtacggcgattgatgcgggtcataccaacgttctggctctgcagagttcagctgcgggtagcgcaacaaacgttggtgtgcagatcctggacagaacgggtgctgcgctgacgctggatggtgcgacatttagttcagaaacaaccctgaataacggaaccaataccattccgttccaggcgcgttattttgcaaccggggccgcaaccccgggtgctgctaatgcggatgcgaccttcaaggttcagtatcaataacctacccaggttcagggacgtcattacgggcagggatgcccacccttgtgcgataaaaataacgatgaaaaggaagagattatttctattagcgtcgttgctgccaatgtttgctctggccggaaataaatggaataccacgttgcccggcggaaatatgcaatttcagggcgtcattattgcggaaacttgccggattgaagccggtgataaacaaatgacggtcaatatggggcaaatcagcagtaaccggtttcatgcggttggggaagatagcgcaccggtgccttttgttattcatttacgggaatgtagcacggtggtgagtgaacgtgtaggtgtggcgtttcacggtgtcgcggatggtaaaaatccggatgtgctttccgtgggagaggggccagggatagccaccaatattggcgtagcgttgtttgatgatgaaggaaacctcgtaccgattaatcgtcctccagcaaactggaaacggctttattcaggctctacttcgctacatttcatcgccaaatatcgtgctaccgggcgtcgggttactggcggcatcgccaatgcccaggcctggttctctttaacctatcagtaattgttcagcagataatgtgataacaggaacaggacagtgagtaataaaaacgtcaatgtaaggaaatcgcaggaaataacattctgcttgctggcaggtatcctgatgttcatggcaatgatggttgccggacgcgctgaagcgggagtggccttaggtgcgactcgcgtaatttatccggcagggcaaaaacaagagcaacttgccgtgacaaataatgatgaaaatagtacctatttaattcaatcatgggtggaaaatgccgatggtgtaaaggatggtcgttttatcgtgacgcctcctctgtttgcgatgaagggaaaaaaagagaataccttacgtattcttgatgcaacaaataaccaattgccacaggaccgggaaagtttattctggatgaacgttaaagcgattccgtcaatggataaatcaaaattgactgagaatacgctacagctcgcaattatcagccgcattaaactgtactatcgcccggctaaattagcgttgccacccgatcaggccgcagaaaaattaagatttcgtcgtagcgcgaattctctgacgctgattaacccgacaccctattacctgacggtaacagagttgaatgccggaacccgggttcttgaaaatgcattggtgcctccaatgggcgaaagcacggttaaattgccttctgatgcaggaagcaatattacttaccgaacaataaatgattatggcgcacttacccccaaaatgacgggcgtaatggaataacgcagggggaatttttcgcctgaataaaaagaattgactgccgggtgattttaagccggaggaataatgtcatatctgaatttaagactttaccagcgaaacacacaatgcttgcatattcgtaagcatcgtttggctggtttttttgtccgactcgttgtcgcctgtgcttttgccgcacaggcacctttgtcatctgccgacctctattttaatccgcgctttttagcggatgatccccaggctgtggccgatttatcgcgttttgaaaatgggcaagaattaccgccagggacgtatcgcgtcgatatctatttgaataatggttatatggcaacgcgtgatgtcacatttaatacgggcgacagtgaacaagggattgttccctgcctgacacgcgcgcaactcgccagtatggggctgaatacggcttctgtcgccggtatgaatctgctggcggatgatgcctgtgtgccattaaccacaatggtccaggacgctactgcgcatctggatgttggtcagcagcgactgaacctgacgatccctcaggcatttatgagtaatcgcgcgcgtggttatattcctcctgagttatgggatcccggtattaatgccggattgctcaattataatttcagcggaaatagtgtacagaatcggattgggggtaacagccattatgcatatttaaacctacagagtgggttaaatattggtgcgtggcgtttacgcgacaataccacctggagttataacagtagcgacagatcatcaggtagcaaaaataaatggcagcatatcaatacctggcttgagcgagacataataccgttacgttcccggctgacgctgggtgatggttatactcagggcgatattttcgatggtattaactttcgcggcgcacaattggcctcagatgacaatatgttacccgatagtcaaagaggatttgccccggtgatccacggtattgctcgtggtactgcacaggtcactattaaacaaaatgggtatgacatttataatagtacggtgccaccggggccttttaccatcaacgatatctatgccgcaggtaatagtggtgacttgcaggtaacgatcaaagaggctgacggcagcacgcagatttttaccgtaccctattcgtcagtcccgcttttgcaacgtgaagggcatactcgttattccattacggcaggagaataccgtagtggaaatgcgcagcaggaaaaaacccgctttttccagagtacattactccacggccttccggctggctggacaatatatggtggaacgcaactggcggatcgttatcgtgcttttaatttcggtatcgggaaaaacatgggggcactgggcgctctgtctgtggatatgacgcaggctaattccacacttcccgatgacagtcagcatgacggacaatcggtgcgttttctctataacaaatcgctcaatgaatcaggcacgaatattcagttagtgggttaccgttattcgaccagcggatattttaatttcgctgatacaacatacagtcgaatgaatggctacaacatcgaaacacaggacggagttattcaggttaagccgaaattcaccgactattacaacctcgcttataacaaacgcgggaaattacaactcaccgttactcagcaactcgggcgcacatcaacactgtatttgagtggtagccatcaaacttattggggaacgagtaatgtcgatgagcaattccaggctggattaaatactgcgttcgaagatatcaactggacgctcagctatagcctgacgaaaaacgcctggcaaaaaggacgggatcagatgttagcgcttaacgtcaatattcctttcagccactggctgcgttctgacagtaaatctcagtggcgacatgccagtgccagctacagcatgtcacacgatctcaacggtcggatgaccaatctggctggtgtatacggtacgttgctggaagacaacaacctcagctatagcgtgcaaaccggctatgccgggggaggcgatggaaatagcggaagtacaggctacgccacgctgaattatcgcggtggttacggcaatgccaatatcggttacagccatagcgatgatattaagcagctctattacggagtcagcggtggggtactggctcatgccaatggcgtaacgctggggcagccgttaaacgatacggtggtgcttgttaaagcgcctggcgcaaaagatgcaaaagtcgaaaaccagacgggggtgcgtaccgactggcgtggttatgccgtgctgccttatgccactgaatatcgggaaaatagagtggcgctggataccaataccctggctgataacgtcgatttagataacgcggttgctaacgttgttcccactcgtggggcgatcgtgcgagcagagtttaaagcgcgcgttgggataaaactgctcatgacgctgacccacaataataagccgctgccgtttggggcgatggtgacatcagagagtagccagagtagcggcattgttgcggataatggtcaggtttacctcagcggaatgcctttagcgggaaaagttcaggtgaaatggggagaagaggaaaatgctcactgtgtcgccaattatcaactgccaccagagagtcagcagcagttattaacccagctatcagctgaatgtcgttaagggggcgtgatgagaaacaaacctttttatcttctgtgcgcttttttgtggctggcggtgagtcacgctttggctgcggatagcacgattactatccgcggctatgtcagggataacggctgtagtgtggccgctgaatcaaccaattttactgttgatctgatggaaaacgcggcgaagcaatttaacaacattggcgcgacgactcctgttgttccatttcgtattttgctgtcaccctgtggtaatgccgtttctgccgtaaaggttgggtttactggcgttgcagatagccacaatgccaacctgcttgcacttgaaaatacggtgtcagcggcttcgggactgggaatacagcttctgaatgagcagcaaaatcaaataccccttaatgctccatcgtccgcgctttcgtggacgaccctgacgccgggtaaaccaaatacgctgaatttttacgcccggctaatggcgacacaggtgcctgtcactgcggggcatatcaatgccacggctaccttcactcttgaatatcagtaactggagatgctcatgaaatggtgcaaacgtgggtatgtattggcggcaatattggcgctcgcaagtgcgacgatacaggcagccgatgtcaccatcacggtgaacggtaaggtcgtcgccaaaccgtgtacggtttccaccaccaatgccacggttgatctcggcgatctttattctttcagtcttatgtctgccggggcggcatcggcctggcatgatgttgcgcttgagttgactaattgtccggtgggaacgtcgagggtcactgccagcttcagcggggcagccgacagtaccggatattataaaaaccaggggaccgcgcaaaacatccagttagagctacaggatgacagtggcaacacattgaatactggcgcaaccaaaacagttcaggtggatgattcctcacaatcagcgcacttcccgttacaggtcagagcattgacagtaaatggcggagccactcagggaaccattcaggcagtgattagcatcacctatacctacagctgaacccgaagagatgattgtaatgaaacgagttattaccctgtttgctgtactgctgatgggctggtcggtaaatgcctggtcattcgcctgtaaaaccgccaatggtaccgctatccctattggcggtggcagcgccaatgtttatgtaaaccttgcgcccgtcgtgaatgtggggcaaaacctggtcgtggatctttcgacgcaaatcttttgccataacgattatccggaaaccattacagactatgtcacactgcaacgaggctcggcttatggcggcgtgttatctaatttttccgggaccgtaaaatatagtggcagtagctatccatttcctaccaccagcgaaacgccgcgcgttgtttataattcgagaacggataagccgtggccggtggcgctttatttgacgcctgtgagcagtgcgggcggggtggcgattaaagctggctcattaattgccgtgcttattttgcgacagaccaacaactataacagcgatgatttccagtttgtgtggaatatttacgccaataatgatgtggtggtgcctactggcggctgcgatgtttctgctcgtgatgtcaccgttactctgccggactaccctggttcagtgccaattcctcttaccgtttattgtgcgaaaagccaaaacctggggtattacctctccggcacaaccgcagatgcgggcaactcgattttcaccaataccgcgtcgttttcacctgcacagggcgtcggcgtacagttgacgcgcaacggtacgattattccagcgaataacacggtatcgttaggagcagtagggacttcggcggtgagtctgggattaacggcaaattatgcacgtaccggagggcaggtgactgcagggaatgtgcaatcgattattggcgtgacttttgtttatcaataaagaaatcacaggacattgctaatgctggtacgcaatattacctgaagctaaaaacctgcacgttagccctttgtaggccagataagacgcgtcagcgtcgcatctggcataaacaaagcgcactttgctggtctgttcccctcaccctaaccctctccccggaggggcgaggggactgtccgggcacatttttagactttgtcatcagtctgagcctgccattggcaggctctggtgtccttttacgctaccatgctaataatcagcacaataatcagcccaaccacggagttgaccagctccagcagaccccaggttttcaacgtgtcttttactgacaggtcaaagtaacctttgaacaaccagaaagatgcatcgttaatgtgggtgagggtgttggaacccgcagccgtcgccagtaccagcagcgccggattcacgccaaccagctgaccagttgctggatctaggattgcagcactgataatcccggcggcggtcatcgccgaaacgacaccctgacccgtcgccagacgaattagcacagtgatcagccatgccatgatgtagggcgagatattgccgtgggacatcaacatgccgatggtgtcgccaatgccggtgtcgatgatggtctgcttcagcacgccacccgcaccgatgatcagaatcaccattgcaatactcttcaccgcgctttcaaaagcgttcatcacccactgcatgtcatgaccacgtgcggtgccaaagagtacgaatgcaaccaccatcgcaataaacattgcaatcggcgaggaaccgataaagttaaccacttcccaggcaggggtatcttttaccagccagatattggcgatggtggtagagatcataatgatcgccgggatcagcggcaccagaatcgaaacgccgaaagagggcagattattcatatctaccggttgatctgctttcaggaatgatggcgttgggcgctcaagattgccgaggaacttcggcaggatcagacctgcgcagattacacttgggatcgtcaccagtacgccatagatataaaccatccccatatccgcgccataagcattcaccagcgccaccggacccggctgcggtgggaacagtgaatgtgcggtagtggcagctgctactgccgggatcgccagtttcaggaacggaattttagcttcggcggcaataacaataaccagcggcgctaacatgataaaggccacttcatagaacatcgccagaccaaaaatcaggccgatgataatcaccgacagctgtacatagcgcagaccgagacgcgccagcagcgtatgcgctatctggtgagccgcgccggagtcgaccatcaatttaccgatgaccgcaccgaacaccacgatgatagccagttcccccagcgtgttgccgaagcccgctttcatagtgtgcagcagcgacatcaaatccatgcccgccagcatcccgacggacagcgccgccaccaacaaagccaccattgaattgattttgaacttcaaattcagtaccagcatcagaccaatgccgaataccacccagagaatgttaagcacatgcataacgttttaccttacctggttgaaccgttgttattttgggcgatatgttatgtaaattggtcaaccattgttgcgatgaatgtcacatcctctgatcaataaccatcgattaccctttgctgcaatttgcagcaacaaccatgagagtgaaattcttgtgatgtggttaaccaatttcagaattcgggttgacatgtcttaccaaaaggtagaacttatacgccatctcatccgatgcaacgccacggctgcggtctggttgttcatccggatacctaaacaactccagggttccgcgtctctttgctgtggaacccactatgtgaaagaggaaaaatcatggaacagacctggcgctggtacggcccaaacgatccggtttctttagctgatgtccgtcaggcgggcgcaactggcgtggttaccgcgctgcaccatatcccgaacggcgaagtatggtccgttgaagagatcctcaaacgcaaggcgatcattgaagacgcaggcctggtgtggtctgtcgtagaaagcgtgccaattcacgaagatatcaaaacccacactggcaactatgagcagtggatcgctaactatcagcagactctgcgcaacctggcgcagtgtggcattcgcaccgtgtgctacaacttcatgccggtgctcgactggacccgtactgacctcgaatacgtgctgccagacggctccaaagctctgcgcttcgaccagatcgaattcgctgcattcgaaatgcatatcctgaaacgcccaggcgcggaagcggattacaccgaagaagaaattgctcaggcagctgaacgcttcgccactatgagcgatgaagacaaagcgcgtctgacccgtaacatcattgctggtcttccgggcgcggaagaaggctacaccctcgaccagttccgtaaacacctggagctgtacaaagatatcgacaaagcgaagctgcgcgaaaactttgccgtcttcctgaaagcgattattccagttgctgaagaagtcggcgtgcgtatggctgttcacccggacgatccgccgcgcccgatcctcggcctgccgcgcattgtttccaccattgaagatatgcagtggatggttgataccgtaaacagcatggcaaacggttttaccatgtgcaccggttcctacggcgtgcgtgctgacaacgatctggttgatatgatcaagcagttcggtccgcgtatttacttcacccatctgcgctccaccatgcgtgaagataacccgaaaaccttccacgaagcggcgcacctgaacggtgacgttgatatgtacgaagtggtgaaagcgattgttgaagaagaacaccgtcgtaaagcggaaggcaaagaagacctgatcccgatgcgtccggaccacggtcatcagatgctggacgacctgaagaagaaaaccaacccaggttactccgcaattggtcgtctgaaaggcctggccgaagttcgcggtgtcgaactggcgatccagcgcgctttctttagccgttaatatccaccggcatggctgcgcgccgtgccggttccttcttccttgccgtcactctttgaagacggattctggagtttacgatgactactattgttgacagcaatctgccggttgcccgcccgtcatgggatcattctcgtctggaatcacgcattgtgcatctcggttgcggggcgtttcaccgcgcgcaccaggcgctgtatacccatcatctgctggaaagcaccgacagcgactggggcatctgcgaagttaacctgatgccaggcaacgaccgcgtgctgatcgaaaacctgaaaaaacagcaactgctgtacaccgtagcggaaaaaggcgcagagagcaccgagctgaaaattatcggttcgatgaaagaagcgctgcatccggaaatcgatggctgcgaaggtattctcaacgcgatggcgcgtccgcaaacggcgattgtctctctaacggtcacggaaaaaggctactgcgctgatgcggcaagcggtcaactggatctcaataacccgctgatcaagcacgatctggaaaacccgactgcgccgaagtccgcgattggttacatcgtcgaagcgttgcgtctgcgtcgtgaaaaagggttgaaagcgtttacggtgatgtcctgcgataacgtgcgtgaaaacggtcatgtggcgaaggtcgcggtactggggctggctcaggcgcgtgacccgcagctggcggcatggattgaagaaaatgtcaccttcccgtgcaccatggttgaccgcatcgttccggcggcgacgccagaaaccttacaggaaattgctgaccagctgggtgtttacgacccgtgcgccattgcctgcgaaccgttccgtcagtgggtgattgaagataacttcgttaatggtcgcccggattgggataaagtgggcgcacagttcgttgcagacgttgtgccgttcgaaatgatgaagctgcgtatgctgaacggcagccactcttttctggcgtacctcggttacctcggcggctatgaaaccattgccgacaccgtgactaacccggcttatcgcaaagcggcctttgccctgatgatgcaggaacaagcgccaacgctgtcgatgccggaaggtacagacctgaacgcctatgcgacgctgctgatcgagcgtttcagcaacccgtctctgcgtcaccgtacctggcagattgcgatggacggcagccagaagttaccgcagcgtctgctggacccggtgcgtctgcacctgcaaaacggcggcagctggcgtcacctggcgctgggcgtggctggctggatgcgttacacccagggcgtggatgagcagggtaatgccattgacgtggtcgacccgatgctggcggagttccagaagatcaacgcgcagtatcagggcgcagaccgcgtgaaagcgctgctgggcctgagcggtatttttgccgatgatctgccgcagaatgccgactttgttggcgcagtgacggcggcatatcagcagctgtgcgaacgcggtgcgcgcgagtgtgtggctgcgctgtaactaactgattaccctacagacttactggtcaatcaaactgatatttggttgaccagttttcgtttttttgcccacctgtacgtgccaacttccagtgctaatggtatagtttgagattaacgggggccgtaaaattgcccgttgtaggccggataaggcgttcacgccgcatccggcaaaaatttgattaaccgcacctaacggacacaacaccatgaaatctgccacctctgcgcaaagaccttaccaggaagtcggggcgatgatccgcgatctgatcataaagacgccgtacaatcctggcgaacggctgccgccggagcgtgaaattgcagaaatgcttgatgtcacgcggacggtggtacgtgaagcgctgatcatgctggagatcaaagggctggtggaagtacgccggggtgccggtatctatgttcttgataactcaggcagccagaacacagacagtccggatgccaacgtctgcaacgatgccggtccttttgagctgttacaggcgcggcagttattggagagcaacatcgccgagtttgccgctttgcaggctacccgcgaagatatcgtcaaaatgcgtcaggcattgcaactggaagagcgtgaactggcttccagtgcgccgggcagcagcgaaagcggtgacatgcagttccatctcgctattgccgaagcaacgcataacagcatgctggtggagctgttccgtcagtcctggcagtggcgggaaaacaatccaatgtggatccagttgcacagccatctggatgacagcctgtatcgcaaagagtggttgggcgatcacaaacagatcctcgccgcgttaatcaaaaaagatgcccgagcggcgaagctggcaatgtggcagcatctggaaaacgttaagcaacgtctgctggaattctcgaacgttgacgatatttattttgatggctatctgtttgattcatggccgctggataaagtcgacgcctgacttattataataagcgcaagggtaaacgttccttgcgctttcttaaattaagaagtcgcaatgagtattactttgtaaattgcagggtattgtttagctatctgtataacctgaatgttagtactcattcttcctggtagttatttaccaatataattccattcaccattttttaattcaaacagttctggaagagatgacggttgcagagtcatacgtttgagtggtgcattttcatcacccgggataactttatatcccatttttgcatggatctccgcggtaccgggataggcttctataccaattattgggtcattacccaactcaatattagcattaagtaatgcggcaagggcgaatccggaagaatttgctacccctgttaccgtcattatctgatcaatatagatatcaatccttggctgctcattggtccatctttttgcctgagaagctggaagggttgaaatatatcctatcgtggttccggcataaccaggaacattgcaaccagggcctaatgttatttcatgaactgtatagtcctcaacaggatcgaaagggctcttcataaataaatttagccgtaaaccttctgctaactctgtggtagcatgcgcctttttacatatgccaccatatatttcgtctaaagctgaggtgattttcaagttccgatagagcatacgtcctgttgttgtaataccatcggattctctgcatgctcctgtcacataattaaatggccaaggctctttactaatatcaagttttctaatttcgacaacgctttttccatcgtaattatggttattgccacgagtaagaggcggaagatagatgttttccgaatccatgcgtgcatattttaatttacgtgtaaactcactgtcgactattgggtgatgaaggaagtgagcatctgtaataatttgactctgaagggcattgcttaatggcatagacataatagttaccttttatgagtatttcactgatgtttagaaaaatagataaatttttctgtagtaaaaagagaagtaaacaaatgacatgcatgtttctgttgtagtgatatcaactctacacggtgatattaaagggtaggaaacactctaaagtatcaaaaaacgctcatttaaaattatttgcatgcaatttaaaagcatatcttattactaattggaatttgatgttgctatattgaggtctatattaataatgcctgtgaatggtatttttgatgtatttgatatgttatcaatttatattatttacaaactaattgtttcaaataatacatggctgattatgcggaaataaataatttcccaccggaattaagtagcagcggtgacaagtattttcatctacgtaactattcggaatattcagaatatactagcggtttttttttgagtttgatgatttttatcaaatcatgacttttttcctgaaaagtcagtagatattcataggcaagtaaggttttatactttgctgacaggattcaggcctgtctcagactgacatggatgtaatgaacaaaagggaatggctatggaaaatgagcatcaatacagtggtgcccggtgttcagggcaagccgcatatgttgctaaacgtcaggagtgcgcaaaatgatgcgacaatcacttcaggctgttttacctgaaatttcaggcaataaaacgtcatcgctgcgtaaatcggtatgcagcgatctcctcactctttttaattctcctcattcggcattaccgtcattacttgtttcaggcatgcccgagtggcaagtgcataacccgagcgacaaacatctccagagctggtattgccgtcagctgcgttctgcactgttatttcatgagccacggattgcggcgttgcaggttaatttgaaagaagcgtactgccacactctggcgatcagccttgagataatgctgtaccacgacgatgaaccgctaacgtttgatctggtctgggataatggcggttggcgcagtgcgacgctggagaatgtcagctaagcacaatctccagctcgcgcagttcacgccagaagcgttcggcaacgggattcatgcgggtattcatccggtatgcataggcctgaatcgggatcaccagttcgtcccgattcagtacaacgagcttcccgctgcgaatttcttgttggatggcgtactccggcagccaggcaatcccacagccgtcgagggcaacctgctttaaaagctcgctcatcgaagagacaaaaaaggtgctgaaacttaactcactgtggcgcgtcagggtgcgattaatcaatcgccccatgtaggagttgcggctgtaattcagtaacggaaagtgtggctgcgcgaggttaaaaagtgcttctccgtgttcgtcactggcgcagacagggaacaattgagattcaaataagcgaatgtggtcaaacggcgcttccagcaaatcttcgtcgtgaaaggaaaaaatacagtcactttgcccttcacgcagtttatcgaccgcttcatcgacatcaatagcttcaattgcccaggtaaagagcggcggcatctggctgataatggacggtaacagcccgagggaaagagagtgtgcagcggctatcttgatttttcgttgcgcgtaatcgctgccgccacgcagctctgccagattgctctctaactgttgcaacagatggcggatctgcgaatggaagattttcccttgttctgagagttgcagcggcgttacctggcggttaaacaattcaacaccaatcgcctgttccagcgcacggatgcggcggctgaatgccggttgcgagacgttgcgactgactgccgcctgggaaaaattgcggcatttttccagggtcagaaaatcataaagccatttggtttcaatattatgcaaaatcgcaccacagtcatccattacgttttactctgtcagccgcccttgcgggcattctacgtccattcgggcggctgacaaccgtttaagccgtttcaaacgttcctttcacgcaggctttgccgtctttgaccatcagtttgccgcgagcgtatacctgctcaatgcgcagttctggcgtcatgaccagcaagtcagcatcattgcctggcagaatttcgcctttcccggtcaggttaaggaaaccggctacgctactggtgagcgggcgcagggcatcgctgatactgaaatcatagtctttgaccagcacctgcacggtttccagcaacgtttcaaaaccggcaacaccgatatgggttaaattcccttcgtcatcgaagaacggctggctaccgttgccgtcggagctgagggtgacgcgtgccagcggaatacccgcctgaacggcgcgggcaataccttcggcaggggcgaccggttcgtcaatgctgctggtgatatcgatggtgccgcctttgcgcgcgaactccagcgcctgctcaaacaacggtacgttgcggttaacgtgggtcggcagcagcttgctgatcggcacatcgcagttttccagcaggtcataaataggctgtaacgcctttttactgtcgcccatgtggaacacggtgacgccaggtttaccgccgagcaaaccgccaacgcgggattctgccgccatattggccaggtgataaacgtccggtgcggcagaacggtgatcagagatggcgcatttcacgccaatcacacgatcgataatcgccacgtctttttccacggaacccgtaatggtgcgggaagggacatgataagcgccggtcagcatccaggcgctgatgccttcttcattgagcgcacgggtcttggcgagcagggattccgggtggcgagagatagagtcggtgcccagcagaccaaccactgacgtgacgcccgcttccgtcaggcgacttagcgccacttccggcgtgcgcgtcgtgggacctgcttcgccgccaccgccaatcaaatggacgtgttgatcaataaaacctgggcagaggatctgcccactgagatcgacaaccgtgcagttcggtacaatgtcagaagggatattgctggcaacggcgataattttgccgttagcgacgaggacatcgcaaattccccgatcttccggcgcatacaaatgcgctccctgcagcagggtaaaaccggctgcggtataatcaatcatggtaactccttgttaaacaataagctgcataacccagatcgacagcaatgcgttaatcacgcagaccgtaatgatatgcgggtaatatttggcattcacttcggctgtccccaggcagcgaccgacattttgcaccgggttgcccattaaatacatcgcgggcagtaaaacggtgacatcgtgaccggttaatgcgccagcggttgccagactggcggcaacaccgactgcgccacccatactcattaatgcggctaaaaggacggttgccgcttcaccgggtaatccccacagcgccattacgggttcacagatatgccccacccagtcgagcaggccggtaattttcagcgcctgaatgatgacaaacgccatcaccacgtttggcagcaggttggtcgtggcgatagtaaagccacggcgcgcgccatcgataaacatatccatgacgtttttgcggacctgagttgtcatgcttgcgctccttgcgttgggttgcgacgttcttcgaagttaagccagacgcgcaaaatgttggctccgacaaatttaaacaccaggatgacggctaaaggtacgattacggacgtgcccagaaaggcaaacaccgcgacgccggaagagaagtagttggtgatgatggcgctaccgctggtttgatatgcggcgaaaatcactttatcgcgttcggtaatttcaccttcctgcgccagctctttggtcataccggcggcggcatcggtgttttgcaggttagcgatcagcgccagcgagcagatccctggaatgcccaacaacggttttagcacaggtgtcattaactgctgcgcggcgcgtaatccaccaagaccatcggtaattgaaataatccccagagagagaatgactgacggtgccagctccagcgcaaagagaaagccatctttagcccccgcgccacccgcgccgcgaaatgaggtggtggctccgttcgcaccaggcagttgcccaaacgatccgttcagaacggaaaaatcaaaaacgcgccaccagctgtctgttccggaaaaaacaccggaaaaaaagattatggtgagaaaaaaggccagataccctttaatgcccactttttctgtcgccagctccccggctacagcatccccttgttgtgtcataacaatccccattgtttttttgtgtttgtgtgttgcttgagccaggaaaattcctggaactgaaaaaccttatcagccatgtgggtatggggaaaatgcaagtatgtttctggctatgcgttttttgcatagcggaaaaattacgctgtgtggaaaaggctctgcgcaggattgagttgcagaaaattcataaaccaagtgacaatgacatcagtaaataaaaacagaaaatccagggacgaaaacgagatggcaaagtacaacgaaaaagagctggcggatacgagcaagtttttaagttttgtcctccgacacaaaccggaggcgattggtatcgtactggaccgtgaaggatgggcggatatcgataagctcatactttgtgcccaaaaagcgggcaagcggttaacccgtgcattgctggatactgtggttgccaccagcgataaaaagcgttttagttattccagtgatggtaggtgcatccgcgcggttcaggggcattcgacttcgcaggtcgctatttcctttgccgaaaaaacaccgccacagtttctctaccacggtacggcaagccgtttccttgacgagataaaaaaacaggggctgattgcaggtgagcgtcactacgtacatctctctgctgatgaagcaacggcacgcaaagtgggagcaagacacggatcgccggttattttaaccgtcaaagcacaggaaatggcgaaacgaggcctccctttctggcaagcggaaaacggggtctggctgacatcaacggttgcggttgagtttcttgagtggtaagggaaacttccctcatgaagtgaccacttgtagcttaaataattgcactgtgctgataagcgcagcaataaacaacgccgccgcgccgcagagagtggcgctggcaagcgccgatgttccattgctgagcatactggtcagcgccgggccgaggatttgcccaatgccgtaaatgagcgtcacaaagcctaaaagattgagatttcccggtacgctcagttggcgggcgatagtcatcaccagagatgtcgtgcccataaaggtaccgccaaaaccaagactgctgatgataagcaagagaggcgagtcgctggcgagagtaagcagcacacagatagcctgcaccagcaaattcgccgtcaggcagggcaaagccccccaacgttttgctgcccatagccagccaaagcaaccaggcacaattgataagccgactaacgtccagagatgggcggttaacaatggtgagcctgcatctttcgccatgagcggcaggtaagtcgcgacgatgatataaccaaatcccgccaggccgtacagaatagccagtaaccaccagctcattatctgttgctccgtttttgccaatggcattggtgtgatggcgtgttttttcgagggcattaaaagcgtaagtgcaatcagcatcatgccagaaagcgccccggcgccttgccataacgtttgcgaggagaggtcaaaatgcaggcctgccagaacatattcattgcccagtgcgatgccaatgccaacgccagaaaacaaagctgccagcacaaaaggatggcgcgtgtgctgcataatcagcgtcgaaccaaaaatcagcataccggcgctggcgacacccgccaggacgcgaatcaataacaccagaataaatggcggcaaccatgccattgcgaggatcaacaacccgctcgccagggcagaagccaacagaaatgggcgcaggcgcgatggctggtgaaatgcgccaaaagaaaatagcagactgccagccagataccccgcatagttgccgctggcaatccacgagagctggctaaatgaaaacgatccttccgccatcatgacgggcaacataggcgtataaaggaagcggcctaaacccatacctaaggtcagaaccagcatcccgaaaagcgcggtgctgaaagaaaagcgttctacgggatgcgtggacgaaggcatgtttaaccttgtttgtcatttttgttgttaacaagttaataacaaaaaggtgaagcatgccagcctgttaatgcgatgattgaggggtaaagcgataaaaacgatttggttcgctaacgatataaatattaccagaggcatccatcgcaaccccttcggcctgtttgatgttatgcgacaaacctcgactgcctttggttagtgacatttcaccgataacctcgccaaccagggttacttcctggagtgcgcgagattcatgagacagcaccagaagcgtatttttttgctggttaaattctgcgccggacacatcatctaaagtaaattgccgttgtagtgcctcgtctttgctgatgtgtaattcattgctacttaacagcccgttaactttgtagacctcaatcggatttttctctttaaaaaaccagaaagtgtgatcctggcgagaataagccaacccttcaaaaccgcaattggttggggagtcttgcagcgggatttttatttttttgaggatttttacttccgagtttggggtcagtgaaatcacataaatggcgtaatcgcgctcatcgctaatgacaaactgattatcgccaatgtattcgatcgtctcgagatccttaacaaaatccagaggaattgtgcggataaaatcaccattggtggtcatttcaacaatggcggcaggtttgttgatagtgctaaaaagagtattgctttgtgccgaccaggtcagcgaagagatattattcgttatgcctgcaatttctttgccgtcaatggtggcgtggtaattctgaaatgatgctgcatgattgcttttacgggcgcaagattgcacgaagaaagtacacactgccacaatggcaaaaagaatcacaataatggagatgcgtttacttaacgaaatactttttgtcacggtaatccctttaaggcaaatcaataagatatcgagaagtatacgtagcgaccttaatgaatccttaacgcggagaaaccccgtaatgtgcaatgcagcgccagacaccatcctgctggcaataaattgactcagtcagcccagggatcacccattgtatttcctcgccggggggacaggtcagccaaatgcataacccgcagccgccgcgtaaatcacggggaatatcgctgacgcgaaaagtcatgcccgctgcctgcaacgctttgcgggtttgtatgacgccgaccgtggagtgaaataaaaataaaaactctttcatcggcgtgtcctcactcgttgaccaattaccgccgcgccaattgcgccagcaaattgcgcatcaggatgggtatttaccggcattcgcaggtgagattccagcatccgggcaaacttctggcaatgactaacgccaccagtaaacagaatcggcgcttcacaggagagacgagcaatgaaattggcactcctccgcgccatcgcgttaatcactcctgcgagaatcgcttctggcgcgacgcccgctgagcgcaggctgatcgcttctgattcagcaaacactgtgcacatactcgtgatggcgtgcggcgtgacattttcggtaatgctgtcgagttgctcgacgctggtgccaagcgtgcgcgagatcacctccaggaaacgcccggtgcccgccgcgcatttgtcattcatcaggaaatcgcacaggttaccgtcatcatcaagctgaatcactttgctgtcctgaccaccgatgtcgattaccgcgcgcgttgctggcgcaagaaaccgtgcgcccagcccgtgacaggagatttccgttacctgtttatcggcaaaatccaccagttgccgcccgtagccggtgagcgtcagaaacggcgttgtctctaacccttcgcgcagagtttcccaggcttcagtaattgctgttgccgggcgaaagggggttggaacgaggaaacggcgcgtaatcacgccgtctgccagtaagatccctttggtggcggttgagccggaatcaatgccaatcgaatatgccactgccactccttacagcatctcaataaaggccgcgacacgggtactgagctgcccgacatccgaggtggagtagtctgtttcaatagcgatataaggaatgttgtgctgctggcgcacatgacgtttaatcgccagcgattccaccgcgtaggtatggcacgcctgcaaaatcacatcaactacgccatcgacctgatattcctccaccatctggctgagcattttcaggcgctgatcgttcggcgaaacacaggagcagccaatcgccagatatttatccgccagcgcgtcgtagacatcgcccgtttctgccacgcattgctcggtcgctttcgccccggtgcagttttcataaccgacaacccagccgccattctcttcaatcgcgcgcaccactttttctgctgcgccgccaatcgggcagccggtgattaaaatgcgcggacgcgggtccagtcgctggccttcttcccactgctgacgaacgcgggcggtcattgcatccagttcattgatcaacgcctctttatcgaaccggaaggttgcgccgtaaaccactttcagaatgtcgctgccgctaagcgccggaggatttaactgcccaagatgataaaaattagccagtgcgcgacgttcgcggtttttcagcgcaatggcatcgcgcagagcatcttcgctaatctcgtgcccaaaacgttcttctaccgttttttgcaagcgcagcatctcggctttccataacgcacgcgaggcatcgtccttaacgctgttgggcaattgcatcacatgaacaggcttaaactccgccatgtattcatacattttctttttgccgtcgcaggtggtttcaccgaccaccagatccgaaaagtagaagtaggggcatttatcggttttgccgaagccgtagctgcttttaatcagcgggcagaggttgcgcggcagatctttctccgcttcttcaatggtttcatcagaggtggaacagagcgaaaccacaaccgcaccggctgccatcgggatctcttgcggcataaaggtgcagtaagtgccaaccagcggaatgccgcgctccttgagatccatgacggtgagaaagcctgtctggcgagcttcagagaactgatcgaaaatggcgggtagatcggtgacaagtgacatgattttccttccccgtaccacgggagataatgaaaagaggccacattattaccattcttttagtatggtttatttgatctctctcgcggttagccacttagtttttcatggatttctaaaaattgccgagggggaacaaggccgggagctgcgacagcaaatataaaattagcccaatacaaccgccaaccagcgtaccgttgacacgaataaactgcagatctttgccgatatttaactctatttgccgcgacatatcccgcgcatcccagctttttaccgtatcgctgatgtggcgcgtcaggaatgcggaaaactcaggcgcgacgcggtgcgcggcttgttcaagatgaccatttaacgacgcccgcaaggcatcatcggcaattaacgtttcgccaaaccattgacccgctcgtgcgatgcgttctttcacacgagaatcttcactgttgatatccactttcagccattcccgtaaatccccccacaattcactgagatagcgattaaaagcttcatcttctttcagatagctttttacggcatcggctcgcgctgccatttccggatcgtttttcagcttgtcgatcagggcgaaggtggcgcgatcaaacgcatggcggatctgatgcgcacgatcgcgactaatatcatcaagcaaagaattcaccgcgtcagaaaccaactccgcgctatgttcgcccaaccattcggtggggagaattttggctttcagtggatgctcgctctccagccagcgaacaatttgctgggcgataaacttgcgcgatttatcgcgctggagaagggcgatcaactgtgcgatcagcgtatccagcagcacctgatgacgatcgtttttggtcatactctccagcatcaacgcactggtgccggaaagatcgaccttatcaatcgcccgatggaccgcgcgcttaagcaggcgctgaatacgcgcatcatcggtaagttcgagaaaaccgctcatgatctgcaacagatgctgaccaacgcggcgggcgttttctggctggctaaaccagttgccaatcagcaacgccggttcgtggcgtcgaatcaatgccaccagggattgagtatcaagaaatttttcctgcacgaactggccgagattttcgccaatccggtctttattacgcgggataatcgccgtatggcgagaaatgatcggaatcggcacgcggcgaaacagcgccaccaccgcaaaccagtccgccagcgcgccgaccatcgccgcttcagcaatcgccttcacgccgctcacccaaaaattgggcggcaaaaacagcgtaacgacaaaggtagcagcggcgataagcagtaaagagagcgccaaccttttggcgcgtctgagttcgatgagtttattcataacgttaagaatagagcctgacggccggatcgcgcaaaaatcactgctcctccactagctcggctgcctgatgctggcgcacgcgattgagcaatcccgccagggtgaaaacgacgataacgcccgccacaacggctaacagatgaaacggcaagcgaccgccgttaaaccatagccagcggccgatttcgaccgagaccgacatcaccatcaggatcaccatatttagcgatgcggagacggtccctttcggtaacttattggaaaacagcgtaaagcggaataaggtcgggaaaatcaaaccaatcccgaaagcatacagactggtgcccagcaccgaccacagccagacgtgcggcgacagcagattgccgacaatcaacagcgagaggccgaccagttgaatgggtacggcacgccagataaaccgcggttcggtcggatctttaacaaaacgcgccacgatggcattcgcaacaatcaccgcgccgaacaccggaacctgtgtccaggcgaactgcgaagttgttaagctgcctgcatcgataaggatcaccggcgagacagccacccagctcatcatcgggatatagcttaaagagatggttgctgcgccaaagaggaacagccgattgcaaaagacattacgaaaatcgcgcaagacgcttttggcgctaaacggaaccgcgccgcgcttcaccgtctctggcatcgccaacagtaagccaacaaatgagataaaacccataaccgcaatgatggcaaaaaggactttccagtgcataaagtgcatcagagctgcgccggaaagcgggccgataatcggcgcaatcagtacgatggaggtgataatcgccatcaacttgatcccttttgtctgtccgaacgcctcctgcaccgtgacataaccaacggtggcaataaaacagatactggtgccctgaattgcacgcgcgataagaaactgtgtcatagacgttgtgaacattgtcgcggcgcaggcaagggtaaaaattagcgccccggtaatcagcaccggcctgcggccaattctgtcggaaagcggccccagcagccactgtaacgccataccgccagcaagatagagactgacggcagcaggggccagactgacatcggcattaaaatcacgtaccacattaatgatcccaggctggatcagatccgtcgacagatacgcagcaaagtcatacaaaatcaacgccatcgggaaaaacagcgtggcggcatggcgggtaaaaaaacgtggcataacaaacaactccttgtccggagaaccccaacggggaaaacgaaattcaataccgtcggtaatgacgaaaggcaggtgagaagggcaacgagactgcaaatgtactgaatttcatgtaatcaaccacactgcctgtgaacacacagacagagaaatactttctgacttcgggtcagaatgtataacgattacaaatagtcatcagcacattacacctcttgaattgatgggttgcatagaaaatatacaccttaagtgtaattaaaatttgcggttaatcaaaagagcgcggtggaaaggggaatatctgccgggtacaggacatgtaaaacgcgagcttgtttccggaaaaatgtatcgtttgcagaagaataaaaatagcctggaaagcgcctcggggaatgggaaattgccgggtgagaatggttttgttagtcgctaaagtcaggccatctttttcaacaggtgatggatcgccatgacaaacttcacgaccagcacgccgcatgatgcattatttaaaacctttctcacgcaccctgacactgcgcgggattttatggagattcacttacctaaagatttacgtgaactgtgcgatctcgatagcttaaaactggaatccgccagctttgtcgatgaaaaattgcgggcgctacactccgatattttatggtcggtaaagacccgcgaaggcgatggctatatctatgtggtgattgaacatcagagccgcgaggacattcatatggcctttcgcctgatgcgctattccatggcggtgatgtagcgccatatagagcatgataaacgccagccgctaccgttggtcatcccgatgctattttatcacggtagccgtagtccttacccctggtccctgtgctggctggacgaatttgccgacccgactaccgcacggaagctttataacgccgcgttcccgctggtggatgttactgtcgtgccagacgacgagattgtgcagcatcgcagagtcgccctgttggagttgatccaaaagcatattcgccagcgcgatctgatggggcttatcgatcaactggtagtattactggttacagagtgtgctaatgacagccagataactgcgctgttaaattacattttactgactggcgatgaagcgcgttttaatgagtttatcagtgaacttacccgtcgaatgccacaacacagggagcgaataatgacgattgcagagcgaattcataatgatggatatataaaaggggagcagcgcattcttcgattgttgttgcagaatggggcggatcctgaatggatacaaaagattaccggactttcggcagagcaaatgcaggcattaaggcagcccttgcctgagcgtgagcgctattcatggctcaagagctaatcagagacggatgacaaacgcaaagcagcctgatgcgctatgcttatcaggtctacataacccattaaatatattgaactttaaagatttttgtagacctggtcaggcgttcacatggcatccggcatgaacaaagcgtactttgcttaattcaggctggaacgtggcgatgacccagcaaagataaaacgagtcacaggttatgcatgagaggaaatcaggcgcttcgccgctatttcgaatttattccattgcccgatacacggcctcgccaatttgcttcagtgcttcgcgataggtttcgctgagcggcaaagcgcagttgatgcgcagacaattacggtatttgccggaagctgagaaaatcgagcctgccgccacctggattttcatgcggcacagctgccgcgcgacgcagaccatatcgacctgttcaggcaattctatccacagtaaaaatccgcctttcgggcgcgtaatacagatttcgcagggaaaatattcccgtatccagcaggtataaagcgccaaattgcgctgatagatctgccgcatccgccggatatggcgatgatagtgaccttccagcacaaacgttgccgccgccatttgcgtggacggcacattaaagctgctgatggcgtatttcatatgcatcagtttatcgtgataacgccccggtgcgacccaacccacgcgcaggcctggtgcaatacttttactgaacgagctgcacaacagcactcgcccgtcgatatcccaggaatgaatggtccgcgggcgcggatactccgtcgccagttcgccatagacatcatcttcaaaaatcacaatatcatgacgctgagcgagagagagaacggcccgtttgcgcgcgtccggcataataaatcccagcggattattacagtttggcaccagaatgatgcctttaatcggccactgttccagcgccagttccagcgcttcaacgctgatgccagtttctggatcggttgggatttcaatcactttcacgcccatgccgcgcagcatctgcatcgaaccgtaataacagggggattcgaccgcgacaatatcgcccggtttacacactgccattaacgccagcgacatcgagttatggcagccgctggtgatgatgatgtcatcggcggtgaccaccgagccgctgtcgagcatcaggcgggcaatctgctctcgcaatactcgctgaccggctaacaagtcataaccgagaacggtttgcagattatgctgcaccacccggcttagctcccgccacagcggtttcaggctgggcgcttcgacatccggtgtgcttttgcttaacggaacaatggaactgtcgctatgcgcctccagcatatccagcacctgatcccactgggtaatttccaccgggcgctgcaccggacgcgtcatcggcggtactggcggctgggctttacgttgtgcgacaaaataacccgaacgcggctgcggagtgatgagcttcatcgtctccagcgtctgatacgcctgctgcacggtgctgatactgacgccgtgctcctgacttaagctgcgcaccgacggcaatttctccccgtgacgatacagcccttgctcaatccgttcggcaagcagagtcgccagatgttgataacgcgtcatgctgtattccttatgtggaccatacagagagaaaaaccggtacagatgaggctaaaaaaccggatgcagatgctgttttaacctgtctgtatgttaaataaaagtaatatttgaatctgtattgtgaactgccagaaggtggatgatgaagcctctgaaagatgaggaggtagcagatggaatttcacgaaaacagagctaaagcgccgtttatcggcctggtgcaactctggcaggcggtgaggcgttggcggcggcaaatgcagacccgacgcgtgttacagcagatgagtgatgagcggttgaaggatatcgggttacgcagggaggatgtggagtgaggggggatatagatttatatataataaaacgtttttatgtttttaaattaagttataaaaattttcccgagacaattcatcaataggtatggagtgtacaggaatatcttcttcactaacctctttaaactcatgtcgataacggtcaaaaaacgcacagtgattacttgtgttttttgactgactttacaactctcattattcgctattgtgcagtttctctaattgttttataccctggaaagttaaatgtcagctactgaatactttttgattgtttgagatttattttcatttgaaattataaaatcaggtgataaatgagttgtgattaatagatggttgatatcatttttatctaaaattgatttatagtatcgacctgaaaaaatagttgttgccgcctgagtaactatacaatattctgaaaggttttctttcaaattagaaatgttgtggggttttgtttttgtatcttttatctctaaggagcttgctttgggtcaatcagaatacatttcatgggtaaaatgtacttcctggctaagtaactttgtgaatcttagagggttgagacaaccggatggccgtcctctttatgaatatcatgcaaccaatgatgaatatacccaattaacgcagctactccgtgcagtcggtcaatcacaatctaatatatgtaatagggactttgctgcctgttttgttcttttttgctctgagtggtaccgcagggattatgaacggcaatgcggatggacgtgggaccctatatataaaaaaatagggatttcattcaccgccacagagcttggtactatcgtaccgaaagggatggaagattactggctgcgcccaattcgattttatgaatctgaacgacgcaattttctcggaacattattcagtgaaggtggtttacctttccggctactcaaagaatcagacagtcgctttctggctgttttctccaggatccttggacaatatgagcaagcaaagcagtcaggtttttctgccctttcgctggcaagagctgtcatagaaaaatcagcgctgccaactgtttttagcgaagatacctctgtagaacttatcagtcatatggctgataacctcaattccttagtacttactcacaacctaataaatcacaaagaaccagtacaacagcttgagaaggttcaccctacctggcgaagcgagtttccaataccgttagatgatgaaacaggaacgcattttttgaatggactgctatgcgcagcctctgtagaggctaagcctcgactacaaaaaaataagagtacgcgttgccaattctattggtcagaaaagcatccagatgagcttagggtgatagtatctcttccggacgaagtttcctttcctgtaacaagcgagccgtcaactacgcgctttgaacttgccatttgtgaagatggtgaggaagtctctggccttgggccagcctatgcttctctggaaaacagacaggcaacagttcgattacgtaaaagcgaagtgagatttggcaggcaaaatccatcggcaggtttgtcgttagtggctcgtgctggagggatgattgttgggagcattaaacttgatgacagtgaaattgccattggtgaggtgccgttaaccttcatcgttgatgcagatcaatggctgttacagggacaggcttcttgcagtgtgcgaagcagcgatgttctgattgtgctccctcgggataatagcaatgttgctggttttgatggccaatcgagggcagtaaacgtattaggactaaaagcactacctgtgaagggatgtcaggacgttacagttacagcaaatgaaacttatcggattcgcaccggaagagaacaaatcagcatcggaaggtttgctctaaatggaaagcgtgcaagctgggtttgtcatccagatgaaacatttattggtgtaccaaaagtcatttctacactaccggatattcaaagcattgatgtaacgcgttacacgtgctgacaaaacagcattacagccagcaggaagtactgcgttggatcgatgtctgttcagggactcaacctaatgcaaaggatcccgcatttcttaaagtcagggcgcatatcttccagcgtaatacctagggaatatgggcttgtgttgataaagattgcagattaaagcacggtacaccgctcgacaaaggctggccctttggctatgtgtatgtgaaccagcgacaaaattgtgactgtggaagccctgtatacgaagttgcattctgtaatgattgtaatgagcctcatcttctggcacgggacaaaaagggcaaactagtccagtgggaaaataaaggtggcgatgaattctctttgcaggatgaagtacctgttgaacatgacgctacagaagaaaaagtcgaaaaagagaacagttttcagcctccgttgattattgccgcaggagagaccagcgaggcaggttataccctacaacgcctcgaccgtcagacgcgccgtattggcgttattaacaatgacagcattccgctgattattaatgatattgaacaggtttgtagtgccagtggctgtggctacagaggcatgagtgggaaacagcccttccggcgtgcactattaggtgggccattttacgttactaatatcgtgcccaccgttctagagtattgtcaggactttaccagtgatgaaggcaaagagggcgtcggaccagattcgttgccaggacgaggtcgtcgactcatcacctttacagacagtcgacaagggacagcccgaatggcggtgcgtatgcagcaagaagcagaacgcagtcgcttacgcggaagcgtagtcgaaattctcagctggcatcaaaggacgcaaacgtctacagcgccgaatgccaatgccgatctggaaaaattagcggccagggcgaagcaagcccgtgagcaggcagaagaatatcgaagctggggaatgccagaccaggcgaaattgtcacaagcacaggctgaacagcttgaacaggcttatcaggctgcaaccggtgggaaagccgcgactatcctggtatcccgaacctggacggagatggttaacgagcttaaagagagagccgatatccgcgggccggttctgcaatataaccattatcttaagcctgaagtgtttaatgaaaacggcggcccccttaagctttctgaaatgttgttgttccgggaattcatgcgtcgccctaaacggactaacagcctggaaacacaggggctggttcaggttggttaccaggggctggagaaaatacataagagccccttgcactggcaggaaaaaggattaacgctggatgactggcgcgattttctcaaggttacgttggatcattacgttcgcgagagcaacttcacacagctggatgatgagctgaaaaactggattggtagccgtttttcatcaaaattcgtccgtaacccggaatcaaaagatcctgaagataatcagaacagacgctggcctcaaattcgtaatggcaacgtatcccatcgtttagcgaagttgctgatgctgggggctggattcaaaaccgtcaatgcggcaactattgatattatcaatacatggctgaaagaagcatgggcccaacttaccggaccgcttgcagtactgaaacccgatggcaaccgtttttatttaccgaaagagcatatgactttttctttaatcacggatgcctggatttgcccggtaaccaataaaatcctggatacggcttttaaaggcttaaccccttatctgcctacccatatttcgttcgagcatcttaccctggcgcaatatgacacttttgtcgcgcagaaagtcacaatgccggaaatctggaagctggatcgttcacaggaagactacgcagagggtctggcaaaagcacgcgactgggtcagccatgatccgctgatcgcacaattgcggtcggaaaacgtctggacagacattaacgatcgtgtcgtggaaggcggcttctactatcgtactgccgagcactctgcccagcagtcgtcagaacgtctgcaaagctatgaaaagatgttcaagaatgggcaactaaatgttctcaactgttccaccaccatggaaatgggggttgataccgatcgcgtgatgacgctggcctctcgcagccagcaggcaacgattccggggccggagtggcacctgaatgacgaactggtggtgcgtagtctcggttataaaacggtagaactgaacgagtttattctgccggctaaagccaccaacgctgtcgagcgggtcaaagacattcagatccacaaacagttgaatggaccactgtcgcagtttgggcaacgcttctgggacgtgctgtttaacgaccatgaagaagcgcagtcactgatgaataacacgcgaattaccggcgttcactataccgatcgctatctgcaaaacccggttgcgctggcgttgttgggatcaattctgagaccgctaaaaacaaagctgaccgatggcgctgaagtgacgctggatacgctatttaaagataaagatcgccccggtaaccggcctttccatgactggatgagcatagcggattttcaggatttcgctgatcagtggtttgctgctgcgctgggcaggccggtagaactgacggtgttcgactcgccgcgcgatatccctcaccatcgtaaactgacggtgacttttgaggatggtcaggtattgaagatccgcttcgatcaggggatgggctactggcgcatcaacttttcatcgcaatggcattactttgatttccgcgatgacgtttctttccagttagtcaaaatggctcaggcctgcaaggaagggaatgtcgccaacagcgaagagagttgggcaacggatgtgctggtggaggtgatcgcctcctgatgatgagccgctcccgatgtggtgtcgggagcggtattttctataaaacttaccgcttatttgagatattcatcgaaaatgtcgagtaattcttgatgtatacacggccattcctgacctaaattgacggtacacaagccaatatcgaagccattaattttataacgatgtttcactgcggtatctacgtggggatatattaataacccccctatgttttcgccattttcaggctttaacgaccataagtaattcatcagttgataaagattttgcgaatgaaatttttctgttcccattcgtcgtgaaaaaatgctcttatagtatttggcgtcaacgataagtattttttctgatgagcgaatggtgatgtcagtttccattcgaggtaacaaattaagtgactgatccgatatactcgatgcatcccattttaaataagagcgggttgtgtttgcagacgttaattcacgacggcaaaattcataaagaaacttttgataaagtaatgacatctctttttcgtttctttcaaaatcatagaaacggtagtgtcctttgttttgacctggaatagaattattgacgatgaatttgcagacactgataacgaatttataataacgcgtattttttccgccattcagatagctgaaatgctgcggagttaaatgaagagtgctaatgcccggtaattttctataaagtgaacgagcttcatctctgatagttgaatttaacttttcatgcttaattaatatggctaatgtgctttttataattcggttagccagcgtgtcttcattaagcatatcaaaagtactgacggttttcccatgattaagatggaagccgcgtattgttttagcaaactctattcgccctttgatgccaggaatgatctcggtgttaggattgtaatcaagctcaagccctcggcgtgaaagctgtaaaacccctttatttaatacataccccaggatatcaagaagattgttaccgggtatggcttcaaggtttgcctgcttaatttcctgtaaataaccccatgcataggtaagcatgtaatagatattacggacaggtatcacgggctgttccactatgagtcccctaataatttgttggtccatttctgttgtttataggggtcatcaaagaaatattcttcgagtaaaggggcgatatccgtcatcacaatttcattaagccattgcgtatccggagaggtgccatcttccaacccacagcagaagtaactatgcccaatgcggaatcctttcccaaggatagtggcctctttgctgatttcctggttcaactcgttcattttttggcataaagactcaacaaatgaaggttctgcttttttattcagtaaaaaattccggaactgtggtgtatcaaaacctggctcaatatctatgaaagaaaatcgtctgcgtagggcatagtcaacaacggccagagagcgatcggcagtattcattaaaccgatgatataaacattctccgggacatagaatcgttcttcatcgttttcggagtaggttaggggaacagaccagttttcacctcgtttatcatgttccattaacatcatcacttcgccaaatactttactgagattggcacgattgatttcatctataataaaaatatactttttctctggctgctctttagcttgctgacaaaaattgtaaaatatgccgtctttacgtcggaagccgacgccattcggacgatagccctgtataaaatcctcatagctataagattgatggaactgaaccatattgacgcgttgcggagccttttctcctgtcagcaagtaagccagacggcgtgcaacaaaggtttttccaacgccgggcggcccctggaggataatattttttttgatggttaatcgtttgagtatcgtctctattgtggtttcagggataaacaaatcatttaacgcatcttccagacagtatgattcagtttttgacataggtggaataacactcttgccagaattaaatattaatttatagtcgttgattatgttgtccagcatagaggcaaatcgggtgtaatcaataccctgtgagactttttgggaacaggcgtaataggactgtccgtattttttaggatatacacccgaagttgcctgaaaatactctgcgattgttttaggtatgtctgaagagaactgccattgggcatgtggttcattcgtgtcgcttataccataagccaaaaccaactcatcaaaatctttataatagagaataacgggatatataccgttagaagcttcctgaccttctccaagaaatgcaaaccagggaatagacgtaaaattaccataaccgaaactcaattttactcgcaggttacggtaagacgttggataatctttagtggattgcgaacgttgttgctgtgcttgcttaataaatttttcaatccagggttgaatagattccataagatatgccttcctcattgctaagcctctattatcgctttcgcaacgtactgaaacaatagatttttactgcaaaatcagactggtaaatatttactgagggggaaagtttctattgagtcagtggaaggctcccggtggttaaccgggagtaaacgctgttacgcgactttctgtttaccggcaatcactccaataaacgcctgcacctgcttttgtttacgcgccgacagtttgcacacctggcgtagcgactgcatcagttcgctctcctcggcggcgggtggttgggcggtgaggacaatacagccttccatcactttgacatctaccgccgtgccagtggcaaaaccggcggcttccagccactgacctttcagggtgatggcgggaatacggctgtaatccgggtagcgactcgcataaccgacggtgacatgacggttatttgccggggagacttctgcttcgaacggttgtgcaatagaatgcgtgtcagtcataactgctattctccaggaatagtgattgtgattagcgatgcgggtgtgttggcgcacatccgcaccgcgctaaatacctgtatatatcatcagtaaatatggggaaagtccagctaaaaatagaataaaatgggcaatttctggaatgatttaaatatatttatgtgggttatgattggcgtgaaataataaaaagcgcaccggaaaggtgcgccagaaaataatgttcaggattttttacgtgaggcttttttacccccgctagctgcgcgttcagctttgattttttccagcaacgcggcggcgctgttttctccgctgatcaaatccgggttttcggcccgccactgggcggtaagttcaccacggaacgcttttgccaggatggattgcgtcaggttgttgacgcgggctaaggcgttgttgacctgtttttctatggtgtcggcgtaggcgaagagttgctcgacgcggcgaacgatttcggcttgttcttttactggaggtaataaaacaacttgggatttgatatcttttcctgaaatacctttttgaccagaagttgttttcacgcagttcatcattgcatttcgtgctgagggggatgaaaaaaatatttcgatatattctggtaaagcatctttggttaatcgagctcgaataagtttatcaggatatagcaaattttgatgttgtaattttttcaataacccacaaacaccaacaaattctaaacttccgttatagcgagtaaataaaagatctccatcttgtaatttgtggcggtttagttcactttctgaacattctagaaaccgaatatcgttttgatctacatggccagcacgtacagaactaatgcgtagtattggatgaccaacaccactttcatttggctttgatgaaagaccattacgtaattcagttaagatagattcaaaatttaacttcttaaatacagaatgttgcggctcaaaattacgccatttttctgtcaattttccattaactgcgccccccaataccgcttgacgaaaacgtttcaggatttgtgggatttgctcaaaacgtgctttggtgctgtctacctgcgccagcagcgtatcgagtttttcagcgatgattttttgttcggcaagtggtgggattggtatatttatcaaatcaaagcttgccggcttaatattattaatatttgcaccagcagaaagtgatgaaattttgtttcgataaagagaagattttgtgaaatgagcaataaaaccagaaaatataagtttttcaggacgtaatacaccgcaaaatgcgccgaaactacattcaaatggtagatgctgatgtgcggatttaccaactacggatttgctccctgatgacattgcaataacaatatcttcaggagatattttttgactttctttaacaagatttttaggaacaaaaaccaagtccgtagtatcaaacttgccattctgaatattgttcgcacggataagaggcaaataatcatcttttagataatttattgcctgctcttttttatacgttactcctcggattagagttgtgaccgtagatactggggcgataacccacccctccggcaatttccccgcactcattccttcaccccaccaaacgcttcttccagcaactgacgctgcaaatcggcctcatcgctcgcccccagttcacgcatcagcgcatccagttcagacagcgcctgtaccagttcgcccatcgcttctgccgctaatacatccggctccggcaggctgtcggcatcaatactgtctttatctttcagccaggagatatccagcgaatcggattttgcggtgcggatccactcacggctgaacttgcgccagcggctggtagcaagatgctggtcggtgtttttgttctcttcgctgtcggcaacttccgtctcttcggcgttaaaactccattcaccttcagtgcgcgggcttaaaccgtgcgggtcttcgccatacacgcgctcaaacggctgcaaatgctcgtcggtaaacggtgtgcgcttgccgaaactcggcatattggtacgcaggtcatacacccacacatcatcggtacagttcttatcctgattcgggttcgccaccgtccctttggtaaagaacagcacgttggtcttcacgccctgagcgtaaaaaataccggtcggcagacgcagaatggtgtgcagatgacacttatccatcaggtcacgacgaatgtcggtgcctttgccgccttcaaacagcacgttatccggcaccaccaccgccgcacgaccgccgggatgcagcgtttcgataatatgctgcataaagcacaactgtttgttgctggtcgggtgaacaaaggtgcgggtaatgttggtgcctgcggcgctgccaaacggcgggttagtggcgacaatatgcgccttcggcaggttttcaccgtcgctacccagagtgttgcccagacggattgcgccgccgtggtcgaggttgccttcaatatcgtgcagcaggcagttcatcagtgccagacgacgggtgccgggcaccagttcgaggccgataaacgcgcggtggatctggaaatcctgcgtgtcgccatcaaggtcgtccagatcattggtttgcgacttaacatagcggtcggcttcaatcaaaaagcccgccgtacctgccgccgggtcctgcaccacttcacgcggctgcggtttcagcagatgaataatggttttaatcagcggacgcggggtgaagtactggcctgcaccagacttggtttcattcgcgttcttctgcaacagcccttcgtacatatcgccgaagtcatcgcgcgacttaccgtgcgcgccgttgtaccagtccagcgaatccatattgctgaccagtgcggttatttgtttcggctcggtgatggtggtactaacattatgaaaaactgcctgtaccagctttttgtcatcttcgcctaaatgcacgagcatttttcggtagaactgcaactgctcctggccgatgcgggatttcaggtcatcccagcggtaaccttccggcaggtattccgcttcctgaccggtctctttacacattttcaaaaacagcagcgaggcgagttcattgacgtagttttgataggaaacgccgccatcgcgcaggttgtcgcacagcttccacagcttcgcgaccagatcgttattgttcattgtgagttccgtaaattaagcagcggcccaaattcatcgagccgcagaagaagaaattgccgagggtaatatacacaaaatcattcaggttgcatcaaggcggcaagtgagtgaatccccgggagcgtacagaagtacgtgaccggggtgaacgagcgcagccaacgcagaggcagcctgaaggatgaagtgtatacgtgtcaggccagctcgtcccagatataatcgctgaatttgcccagcagggtatcgagattatcgtcaaaggttctttgcagcatcgccttcccgccgcgacggtggaagttgccggttttgaagacatcgtcgtcgagcaccactttctctttcagcgcctgcgctaaacgatcgagccagcttaattgctcgctgctccagtcgttttcgcccttaatgcgcgtcagcgcgtgatcgacacgttcctcaaacggtttcagcgcatcgcccaccgcagcgcggcgaatatgaccaatcagccgggcggcgatatcttcattgcgcgtctctttccatgctttgcgcagggaagattcctcaaagtgctggcggtcaaaccactcctgtagctcgaccagccctttacgggtgagatcgcgcgggcgattaataactgcctgcaatgccggttgcgcgttcggggaacgttgcaccagcgagtcaaaggcttcgaggaaatcctgcggcgtgtcgtaatcaccgtacagcgattttacactcaccacttcatcgtcgatatcgaggaagatcggcgcatcattcaggttgttgatgtccgttttcagcttttccagacgggcgataaagccaggcagtttgttaaagacttcggcgctccagtgcggccctttttcccgcaggcgcgaggcgaagccgttaaagttcacgcccgccgcgtcctggcatagctcatccagacgacgcacctgtttatctatcgtttcgctgcggtcacggttaaacgtggccagaccgatgatacgctggagcttcgccaccagttgttcatggctgtgctcggcaaaactgcggccatccgcttcggtgattttataggtttctgaatcggtaatttcattgaccagcgtttgcagttccaccttcgggcgcaccaccaccggacgcatggtgtcgacgctctccagcgtgctgtagatatcgacacagtcaaaaatcttaaagctggttttattcacctccgggcataagcgcgtggcgcggcctttcatctgttcgtacagaatgcggctgcgtactttacgcaggaacacgatattacagatcgacggaatatcgacgccggtcgtcagcaggtcgacggttaccacgatattgggcagccgctctttattgaagcgggtgatcatggtctgcactttgcgcgcgtctttatcggcatcaccggtgatcttgatgatcgcgtcgtgctccagttgcggatactttttcttgaacgcggcacgcagctcttccaccaccatatcggcatgggcattggtgacgcagaagaccagcgttttttgcgatccggtcgggtcaagataattggtgagttcgttacagacggcgcggttaaacgccgggatcaccaggccacggttaaagtcggcgacttcaaaatcctgatcgtcttccagggtgtcattgatcacttctccctgcgggctgatgcgctctacctgctcgcctttggagagataaaccccctcctgcgcgttgcgggtgatgatctgaataggcggatcctggtcgatcagaaaaccgtcgataaccgcggtacggtaggtataacggtaaaccggctcgccgaaaatctgcacagtatgtagcgccggggtggcggtgagagcgatttttaccgcatcgaagtgatcgagaatgcgacggtaggcagagacgtaatccagctggctgcggaactgcagttcgccttcggtctgctctttatcgagaatatagccgcgatgcgcttcgtcaacgacgatacagtcgtaacgggccaccggcatcggttcatctgattgcagggtgcgtttcaccagcgactgtacggtggcaacgtgaattttggtgctgtcttccgggaatttatccgtcagccctttaatgtcgaaaatgctgttgaaggtgtcgccgttaatacgcgtatcttcaaacgcgcccagcgcctgttcgccaagagaacggcggtcgacaaggaagagaatgcgtttaaaacgctgggactggatcaggcggaacatcatggcgattgccgtacgggttttaccggtaccggtcgccatcgccagcaggatctcttgttgccccttgacgattgccttttcaaccgcgcggacggcatcttcctgataataacgcaggcccagctcgctcatgccagggttatcggcaaaccactgattctgtttttgcggttcgctgccgagcatttccagcagctcttccgggcggtgccactcgggtaaggctttcgacatattgcgggtatcacgcacgtcgcgataccagatgccgcttttggtcttcattgttgcgcggtattcgcgcccgttggtcgagtagcagaaggggattttaaaccgttgtttgccgctggtgtcctgccagctggtttcatactctggcactgcttcatgcacttcatccggtgagtagtgctcaagcaaggtttcccgcaggaagccattatcgaaacatttactgtagcgatacgactcattgagcctggcgggaacgtcgatattgttacgtttcgcctctaccaccgcgatgggtttgaggccgacaaacagcacataatccgcaaagccctgattacccgtttcatcttttccggtcggccattcggcaatggctttattgacgccgggttccggacgtgcgcctttggagaagcgcagggttttgctgtcggcctgccagcctgctttacgcagttgcgcatcaatcaggaagcgactctcttcttcgctaaggttgagtgtgcgcttgatggcctgatcggtaatttctttgtggtaagccttacgttcctgttcggtctgttttgccagttccgcgttcttctcggcgagctgtgcttccagtgccgcaaggcgagcctgggtttgcgcttcggtttcctgctgtttgccttccagaatggcgatatagccgttcagggcaaccagcttctgctgttgcgcttcgacttctgcctgagtctgcgctttttctcgcacctgctgttcaagctgttgttttagcgtcagcacttcctggtgatagaggttttcaccacgttccggcaacacaaacaccggcaccgggaagtcataatctttagtgaccagacggtagtaccagacagccaggcggaacccgagtcgcaggcacatctgggcatcgttgagatcgttatgatattcgtgcaccgcctggttaccaatgcggcgtaatttgtgaaatacagagaggatgttgtcatcaacaaaggcgattttgccgagttcacgcaggagatcgtgttgattctcacaaggggggatgttgagtaacagaccaagatgtttcgctgtggcttcgccaaacatacgcattttaatcagcgtcgtgttgggatcatccgggtagttattttccgccgcacaggcgatggcataagtgaagtcgttgacgcccttcaggaattcaaaattggatttattcatcattgttattaatccattgctgtgcgggcctgtccaaatatttaaggcccataacatctcatcttagctttctgtacctttccgggcaatgaccacggtcacagcaactgactcatttctaacgtgttcgtctatttttgtagtgctatagtagccgaaaaacatctacctgattctgcaaggatgtactatgacggttcctacctatgacaaatttattgaacctgttctgcgttatctggcaacaaaaccggaaggtgcagccgcgcgtgatgttcatgaggctgccgcggatgcattaggactggatgacagccagcgagcgaaagtcattaccagcggacaacttgtttataaaaatcgtgcaggctgggcgcatgaccgtttaaaacgtgccgggttgtcgcaaagtttgtcgcgtggcaaatggtgcctgactcctgcgggttttgactgggttgcgtctcatccccagccaatgacggagcaggagacgaaccatctggccttcgcttttgtgaatgtcaaacttaagtcacggccggatgccgtcgatttagatccgaaagccgactctcccgatcatgaagaacttgcaaagagcagcccggacgatcggttagatcaggcgctaaaagagcttcgtgatgcggtggctgatgaggttctggaaaacttattgcaggtttctccttcgcgctttgaagtcattgttctggatgttttgcatcgcctggggtatggcggccaccgtgatgatttgcagcgtgttggcggtactggagatggtggcatcgatggtgtgatatcgcttgataaacttggcctggagaaagtttatgttcaggcaaaacgttggcagaatactgtaggcaggccagaattacaggcattttacggcgcactggctgggcaaaaagcgaaacgtggggtgtttattaccacttctggatttacttctcaggcgcgtgactttgcccaatccgtcgagggtatggtgttggttgatggggaacgcctggtgcacttaatgatcgaaaacgaagtaggggtttcttcacgtttgttgaaggtgccgaaactggatatggactattttgagtgaaatatcaggccggatgcggctgcgccttatccggcccataaccccttacttcctcaaccccgcaaacgcagcccgaatctcttcctccggcagctggatcccgataaacaccatcgtgctatgcggtttttcatcgccccacggcctgtcccagtcggcgctgtagaggcgctggacgccctggaacagcaggcggttaggttcgccgtcaatccacagcatccctttgtaacgtagcagtttatccgccgactccagcagcaggttttccatcacgcgggaaacttcgctgatatctaccgggtaatccagttccaccacaatcgacgaaatatcgttttgtttatctgcgataaagtggaaacgcggtttggtgctgacgacgttttcttccagcataaaaccgttggtgttgaacagcaggcccagatcgatgtcgccgtgggtgacggtgtagaccggtgcgcgggcgttgatgcgcgccaggcgttcatgcagtttttctgcttcgcctgcgacgtcggttttggtcagcagaatgcggtcggcgtagccaacctgtgactgggcgatggtgaactggttcatctgctcatcggcatgtaccgcatccaccagcgcaatcacgccgtccagcagataacgctggcataaaacttcatgggagaaaaaggtctgaataatcgggccgggatcggccatgccggtgcattcaatgaccagacggtcgaactgaatattgcccttgtcgagattgtccagcaggtcgagtagcgcgtcctccagctcgttggagcgcgaacaacagatgcagccgttggtcagcgttttgatctgcgtggcgcggtcgccaatcagttgatcatcaacagagacttcgccgaattcgttttcaatcacggcaatcttgtagccgtgctgttcgttaagaatatggcgcagcagggtggtttttcctgcgcctaaaaaaccggtgagtagggtaactgcaatcgggttcatgctctctccattaacaacagcgcataccgcctttaccatcgccgccgtagcgcgcgttctggcgttcgcggaagaattcttcatagctcatgtacggcttgtcgggatggttggtcttcatatgctcgacgtagttgtcgtagtctggaatgccaatcaacatcttcgccgcctggccgagatatttttttgcctgtcctaagttaccaaacatagttcactctgataagaacaaagccccgccgaagcggggctaaacacggttagtggtgcgaagagatcttcacgccgccttccgggattggaacgtacggtgtttctttgtcagtacgtttgtcgctgttacgcaccgcaagccaggttttgaaaccgtagaagatgatgctgtacaccacaatcaggaacagaatactcagacctgcgttggtgtagttgttcacaacgatgtggttcatattggcaatctgctgcgccgtcaggtcagtaccgttagcaatcttctctttgtactggcttgccatgtagaagaagccttccatctgcgggttggtgctgaacagtttcaggcccagcgcccaggtggtgcagataagcagccatacagccggaacaacagttacccagatgtattgggtgcgcttcatcttaatcagcacaacggtgcccagtaccagcgctacggctgccagcatctggttggagataccgaacagcggccacaggctcttaacgccgcccagcggatcaaccacgccctgatacagcaggtagccccacagacccacacagcccgcagtaccgatgataccggcaaccagagaatcggtttttttcaggaacgggatgaagttacccagcaggtcttgcagcataaagcggccagaacgggtacccgcatccagcgcggtcaggatgaacagggcttcgaacagaataccgaagtgataccagaagcccatgtcagccatcggcagcactttgtggaacacgtgcgcgatacctaccgccagcgtcggcgcgccacctgcacggttcaggacagaaggctcaccaatgtctttcgcggtttgcaggatctgctctggcgaaatcacgaagccccaggagctgacggtcgctgccgcgtgtgcggtaacgtctttcagctgcgccatgatgatcggcgcgttctcgccacccatttcatgcaggttaggcatggtgatgccaaggccagcaggcggggtgttcatcgcgaagtaaagacccggttcgatgatggacgcagcaaccagcgccataatcgccacgaaggactccatcagcattgcgccgtagccgatgaaacgcgcgtcggtttcattagccagcagttttggcgtcgtaccggaagagatcagcgcgtggaagccagataccgcaccacaggcgatggtgatgaacaggaacgggaacagagcgcctttccacagcgggccagtaccgtcaatgtactgggtcatggcaggcattttcagttccgggttcagcaccacgatacccagcgccaggccgacgataacgccgattttcaggaaggttgccagatagtcgcgcggtgcgaggatcagccacactggcagcagtgcggaaacaaacgcatagccaatcagcgcgaaggtaatggtggtgtctttaaaggtcagtgccggaccccagtacggatcgtgagcaatcacgccaccgaagtagatagaggcaaccagcagcacgataccaatgacagagacttcacccacacgccccggacgaataaagcgcatgtagatacccataaacagcgcaatcggtacggttgagcaaacggtgaagacaccccacggactttcggccagggctttaaccacaatcagcgccaggacggcgaggatgatgatcatgattaagaaacagccaaacagcgcgatagtccccggtactggtcccatctcttctttgatcatctcaccaagagatgcgccattacggcgagaggagataaacagcaccataaagtcctgaaccgcaccggccagcacgacccccgccagcagccacagcgtgccaggcaggtagcccatctgcgcggcgagaaccggacccaccagcggaccagcaccggcgatagcggcgaagtggtgaccaaacaacacgtaacggttggtcggaacgtagttcagaccgtcgttgttaataaccgcaggcgtcgcgcgcgtggggtcgagtttcatcaccttctgggcgatgtacagactgtagtagcgatacgccaccagatacaccgatacagaggcgaccacgatccacagggcgctgatgtgctccccccgacgtaatgcaactaccgcgaggcagaatgcaccgatgattccgagaatcacccagggtatgtgcttgaatatctttttagtatccatagtaaaacctggcatgtattgattaatagttggccgaagccgttctaggtttgcgttgcgtttgaggaggtaaattgaccgctatcctgtagtgatgttgccagagttacgcgcgcgtaaagtaaggtaaataactgagtggttattttagggatgtaagcggtcagttttgcggttgagcggcaaaggcgtcgtttaagtgacgataaatatgtgattcatatcacatatttatattgtgaataatttatgtaaataatggctttttaaattcagagtgtgaataaaattcactcggcgtaatctccgcgggatattcataaagtttttcctttccaggccgaaaatcttgcatcggtccacaggaaagagaaaccatgttaaaacgtatcaaaattgtgaccagcttactgctggttttggccgtttttggccttttacaactgacatcaggcggtctgttctttaatgccttaaagaatgacaaagaaaatttcactgttttacaaaccattcgccagcagcaatccacgctgaatggcagctgggtcgcgttgttgcagacgcgtaacaccctcaaccgcgcgggtatccgctacatgatggatcagaataatattggtagcggttcaaccgttgctgagctgatggagagtgccagtatttcgctgaaacaggcggaaaaaaactgggcggattacgaagcgttgccgcgtgacccgcgtcagagcaccgccgcagcggcagagatcaaacgtaattacgatatttatcacaatgcgctggcggagctgatccaactgttaggtgcaggcaaaatcaacgagttctttgatcagccgacccagggatatcaggacggtttcgagaagcagtatgtggcttacatggagcaaaacgatcggctccatgatatcgccgtcagcgataacaatgcctcctacagccaggcgatgtggattctggtgggcgtgatgatcgtcgtactggcggtcatcttcgccgtctggttcggtattaaagcctcgctggtagcgccaatgaatcgcctgattgacagcattcgtcatattgcaggcggcgatctggtgaaaccgattgaggtggatggctctaatgagatggggcaactggcagagagtttgcgccatatgcagggagagctgatgcgtaccgtcggtgatgtgcgcaacggggccaatgccatctatagcggtgccagcgaaatcgccaccggcaataacgatctctcttcgcgcaccgagcaacaggccgcttcgctggaagagacggcagccagcatggagcaactgaccgcaacggtgaagcagaacgccgaaaatgcgcgccaggccagccatctggcgttaagtgcttctgaaacggcgcaacgcggcggtaaagtggtagataacgtggtgcagactatgcgcgatatctccaccagttcgcagaaaatcgccgatattatcagcgtaattgacggcattgccttccagaccaatattctggctttgaacgcggcggttgaggctgcgcgtgcgggtgagcaagggcgcggttttgcggtggtcgcgggagaagtgcgtaatctggcccagcgcagcgcccaggcggctcgtgaaattaaaagcctgattgaagactcggtggggaaagtggatgttggctctacgctggtcgaaagcgccggggaaacaatggcggagattgtcagcgccgtgacccgcgtgacggacattatgggcgaaattgcttctgcttctgatgagcagagccgtggtatcgatcaggttggcttagcggttgctgagatggaccgggtaactcaacagaacgccgcgctggtggaagagtctgccgctgccgccgccgcgctggaagagcaggccagtcgcctgaccgaagcagtggcagtgttccggattcagcaacagcagcgtgaaacatcggctgtggtaaaaaccgtgacgccagctgcgccgcgtaaaatggccgtggcagatagcgaggagaactgggaaacattttaatcgccatgaaaatgcccgataagcaaaatgttatcgggcataaggagattaatctttacgtgggtcgttgatcggctgacgaaccaggaagatgtacgccagtgcccccgctgcggtgacgcaaccgcagatgattagtgccagacggaatgagtgggtggtatcaacaataaaaccagtaatgatcggcgcaaaagaggcgcagatgaagctggcaaagttctggatactgcccaccgacgcagtcatgcgagaagcaactgcgacgtggatcaagccccagcaggatgttccggcaaagtgaatacagaacagtgccatgccaatcagcagaaccgccgtcatggatgttgtcgcttgtggtactatcagcgtaaaggcggcagaacagaacatcccggcaataatgcagatcttacggcttttaatcggagccattccccctttgaccagccagtcggtaacgtaaccgttgaccagcatcccggcagccccaaacaggaaagggatagccgccatcaaccctgtgctttttaaatccaggttataggctgtttgcaggtaaccaggaagccaggccagatacagccacgcagtgtagttgatgccactgaatccgagcatcattccccacattgtacggttacggaacaggctgcgccattcggcaaaactgagcggatctcggcgggcattgacgctacctgcattgagataagcttgctcaacggcagtcagttctacgtgctcgcggttgcgatagagcatataccagccgatggcgagaaaaatccccagtacaccaatggtaataaacatcccgcgccagcccatcaccagcatcatcgccgccagaatcggtgggcttacggcaacgccaatggtagaagctgcgttgaagaagcccatcgggcgtccgcgctctttgatgttgaaccagtcgttaatgacttttacaccgcatgggttcatcggcgcttcaccaatccccataccgatacgcaccaacacgaactgcgtaaagttgtgcaccatgccagacattgcctggaacagtgaccagaagaacatccccagtcccagcatcaggcgtgggcctttacgatccaatagtgggccgcaaggaagttgcgcaatcccgtaagcgagtgaaaacacggagagcaaagcgccgatttcggtggcacttaatcccaattcttcacgaatcgttaaatttgctaccgacagcgaactgcggtcgagataattgattaccgccgcaaaaaataataacaacatggcggtggtttgaatgcgtttaattcgggtactgcgttgaactaatccatctggtggcacgggaatatctgccgacgaagatggagtaaatgaagaacgcggatcgatggtgatattttctttttccacgccggactcctgtatttataattttaattgtttacgtaattgtgcattacgcaaggttgacattaacggcaggttaaagttttaggactttactaccgctcacaaaaacatttttagtcgactgattgtgagcataggtaagcgggaatttcccggtatttatcttttgataaaaccgtgcacccgctaatagtttgctgtttttaatccgtacttaatgagcataacgcgtgttctcattaatggatcgaatcattgattgtttagctgaattcaaatggttacggagcgcaagggtggcatcaaggtcactgcggcaaatcagagcgctgagaatggtcatatgctcatcgacggcaatgatattgcgctgtttaagatcgctttcgtcccattgatagtgaaaatgaaagatgactgagatgatctcaagcgattgatcaaaaaagatattgtcggcagctgaaagcagtaaggagtgaaaatctctgtcaagttgcgagaacatgcgaaagctattgccgatgttgtcacgcagtagccgatgacgttcgagcatggttttcgcctgcagccagcggggatcatgatcaggcaggttgagaaagtgctgaagtgaatgtgtttcgagcatttcgcgtagctcaaacagctgctcggcgtaggattgatcgaattgcttcatgctccactggccgcgcttttcgctgtgaataagattataacggccgaattttaaaagatattctcttactacaaccgggctgacacccgcggcccgagccagttgcagttcagaaaacgtttcccctgggcgtaactggcgctggtttatcatcgtgaaaaaagcctgctcaaacactttgttttgttcactcattgaagcggtagtacaggcgaaaccgtcatcatggtcaggtttacgcgcaataacatagtcgtttccaacctgcgtcaagacgccgcattcgcgtaagtggctgagaatatgacgcactgtggtgcggctgatgttgtacatttccgccagcgcactttgcgatggaagtggggaagggatatgaccccgcgccatatcatcaatgacctggttaatcacattgtggcgtaaattttgtgaacgactcatattttcctccttgtgagtccattaaaacccgatttaaaacatttttatgcgtgtgttttcacaaaaaagattttccgttccgctgccatttttcattttcattgatatctaaggcaacaaaaagtggagagccgaatcatgtctacgatgaatgttttaatttgccagcagccgaaagaattagtctggaaacaacgcgagatacctattccgggtgacaatgaagcattaataaaaattaagtctgtcgggatttgcggtaccgatattcatgcctggggtggaaatcaaccattttttagttatccacgtgttttaggccatgaaatatgtggggagattgttgggctgggtaaaaatattgctgatcttaaaaatggtcagcaagttgctgtgatcccttatgttgcctgtcagcaatgcccggcgtgtaaaagcgggcgtaccaattgctgtgaaaaaatttcagtcattggcgtgcatcaggatggcggttttagtgagtatttgagcgtgccggtggcgaacattttgcccgcagacggtattgacccgcaggcggcagcattgattgaacctttcgctattagcgctcatgcggtgcgtcgcgcagccattgctcccggcgagcaggtgctggtggtcggggcggggccaatcggtctgggcgcggcggcaatcgctaaagccgatggcgcacaggtggtggtggcggataccagtccggcgcgccgtgaacatgtggcaacgcgtctggaattacctttactggacccgtcagccgaagattttgacgcgcagctacgggcgcagtttggtggttcgctggcgcagaaagtgatcgacgcgacaggtaatcaacatgcgatgaataacaccgtgaatttgattcgtcacggcggcacggtggtatttgtcggcctgtttaaaggtgagttgcagttctccgatccggaattccataaaaaagaaacgacgatgatgggcagccgcaacgccacgccggaagattttgctaaagtcggtcgactgatggcggaaggaaaaatcactgctgacatgatgttaacccatcgctatccgttcgccacgctggcagaaacctacgagcgcgatgtgattaacaatcgtgagttaattaaaggcgtaattactttctgataaggcgagattattaaagttgccatgcagcgtccggggaagtgttgggcgctgttttttttgtttcttaataatgtgttgtaagccgtagaaggcgtgtaggtcgcaccctatgcgacctacacatcagtcaggaattacccttcacgttctaccactttaatttccaccatgccgatcccgagcttacgcggcgagtgtccgaggatattcccttcgttggttgagacaggttccggcggcacaattaccagtgtgtcggcatcggttgggttatcgaaatgcagtgtggtggtggtcacttcattgcccagcacaagagtttgttcttcattgcctacgcgtaccggaataggacggctggcgttattgccgtatgctttggcggtaatcaccaggtcaaatttcttcggcagcggatgcttgtactcgatttttacttcatcgcccagctgcgcgttggaccagcggccccacgactccggacgggaaatcccgctaaactgtttcacctcttctggcgcaccggcgacgttaaagatgaaactgtcggctttgtagcgaatatcgttatcaacaatcttcagcgtatcgacattgcctttgtaacgcgccatgtcgatgaccgtatctttaaatgccgttttgccctgccatgttgttttgtcaacatgctgaacaatttgctgaccgccaagctgcccttgcgagacacaccagtcggtggaaagtgccagttccggagcccagagttgtgccatcttgtagcaacggtcaacccagacgaaattgtcgcgtggagcgaaatcggccagctggaaacgcagcggtgctgagtattcgctttccggcagcggttccacgcgtttgtctgaaacccgcaacagcagcggcaaacggaaatggctacccgagaaggcaatcatgtttttctgctggtcgatggtgaactctttcatctctttagggaatttccacaggcggatgatatctggcttccacgccaatgttttctctttgatattgaggaagatttccgacatcgactgcccggataaactgctacgaccaagtccgagatagttatcgccaccgagaatgtccagcaccgtcgcgccgttatccatcgtgttacgcttcactgccagcgtctcttgctgcggcttgtcgccacgaatgacaaaaaacaggttattgcgatcctgcttattgaggtatttccacgccgtgttgttcatcgctaaatggtcagaagagacgacgatgacggtatctttaaaccacggtgacgctttgattttgttgataaacgtcgcgatgttctcctggctgcaacttaccgcgctgaatgactgattcggtttaccgtcaaaatcatattttttgcggttacaggtacgagagataaaaccatccgggtgatgggtatcgactgtcagggtaaacagtgagaatcgctgacctgagcgggaaagctcttcaaactttttccacgcttcatcgagaacggtatcgtcgtagaatccccagtcgttgcgatagtgcgggtcggctaccacgcttttcagctcttctgagccgtataagtggtcgaagccatgcgacttcaggaacacatctttaccggcaaaacgcagattcgcgccctgcacgaaatagttctgataacccgagtttttcaggatatctcccagacagatgttctgcgggaagaagctggagacagaggcggaggcgttgccttcaaagggggcaaacagcggtatgccgcactgagaagccaccatgcccgcaatcgtgtaatctgttcccggcagctgctgcgtgtggctgaaatccaggccttcatttttcaacgcgcccagttcaggcgtgagatccgggaaagcctcgttatcaaaataggtccgctcgagactttcgccgtagatataaaccaggttgagtttcgggtcagggatagttttcgacggctctttataataagccgcaaagtccgggtcgccgtcgcgtgactgggatttcaccagttccgttatctgacgaaatgccgggctggcgtccaccgaacccagcgccagtaagagcgccagcaggctgtaaccaaaatggtgcggatgatggcgacgacggcgcaggatccagcccagcgcaccgaacaccgctgtcagccccagcacaatgccgatacccggcaaaatgtatttgctgacgccagcaccggtcaggctgttggttaaggtatagagaaccgcgtcgttaataccatcgccagtaaaatagtcgctggcaaacagggtgatatttaaaacgacaaatagccccagcaccgttaacgtggctgcaaaccaccaggtgttacgtcccgctttccatgcgtaaatcagcacagaggcgagaaaaagggcgaaagagagtagttctgacaacgggcgatcctcactaaaccgggccgtttagccaacgtttaagctttttgagaagcacaatgtaatggcgtcgccatattgctgcaattctagtgtcaaaaaaatgcgatgttgttaggaattagtttataaacagacttttttgattacggtcacttcccgtgtaacaggggtaaaaccgtccaggagcagggaaaagggcaggagagagccgcgtcagccgggtaacagctaaaacgcggcgtttcgcggttcaggaaatgaagttcagcccctgttttaacaccagatcgcaggctttggttttcaccttttctgccagcggagttgttccgatgttatccagattgagttgctgaccatctttggttttcagcaaaccctgaatgccgtccagatagttggtgtcttctttttgctcttcactgttcaggcccagcttttccagcacctggttcttgatgttttcggcatcggttaccgacgccagcttttgcttcgcgcagtattgcagaatgcctgcggcattgttcatgttatctgcgcttaaggcctggtttccgctgctaagcaagttagttaatgacgcgagcgaccaaccgccttcctgtgtcgtgctgttttggttgccaagttcgctggcggcgctggagagcgcatctttccaggacgcagcatgcaccccggtggaaattaatgcgctggcggcaatggcacagcacagaagatgtttaacagttttcatcatcattactcaaggtggaattgtgtcgcagtataccgccagaaacggggattaatactctttacctgttacccggctacggtagctatcccagttgaagatcacccacaaactgttacccaggcgcatacggtccatcacgcgttcgcccagcaacttggtcatctcttccatattactgttggtcagcatcccggttgggcgtttggaagaagagcggcgatcgacgatctggttgatgatcactttttcgtatttcgattcggtctgcacgccgatctcatcgatcaccagcagatcaacgttgctcagatcgttaagcagttgttcttcgctggtaccgctattcctgaaggtatctttcatcgccgacataatatcggccacggtgatgatcaatacggatttaccgcgtagcagcagctcgttgcagattgccgccgccagatggtttttgccggttcctggcttaccagaaaagatgaagctggcgatgttgccgtcaaactcttcgacatactggcgcgctttgcttaacgcattcatctgcccttcacactcaacgcgatagttctcaaaggaacagttctgatgcagtggacgaataccggagcggttaaaggtgcgctgcattttcatcgcccgattttcacgttcgagagcggcggagcggatcgctccttgttctttttgccaggccagtagttcttcacccgttttgaatgcgggtttgatatgggcaggcatcattttttgcaggcgttgcatcaggtcgccaacgtttttcatcgttaccctctgaatcctggtggaatttggctgtcaggttcgctgaccgtattcacatctcgtttcggcagtccgccgttgctggcacgaccgatttgcaggctgcgcgccagtttttgttgccactgcacatggtgaaagactttaccttccgcctgccagtaggcaatgaatgaggccagttcttcggtggtcaccggctctcttagcgccacgccccatagcgccgccaggcggataaaatcggcatcgggttgccagtccggatacatggcgaatttccccatgggtacagcaacgggagcggcttgcggttcctgatagagttgatcgtccagagcgacatcgcttcccggacgcgccagcttttcttccagcgccagcagttcagccaggcgtgcaggcgtgacggcataaaacgccggggcattgttagcaaatacggcaaccacaccgccttcagcttttgccagaacggtttggtgatcgtgtaccagggcgtcaataccaacgacgtccggggtcaaaactctggaagacatactgtttctcaaatatggaacgatgaacgagaagggagataacttttatagtaacacacggaggagaggaggctgtctctcatccgtgtgcttaagcgaggcaattttatacgcgagggcgcttgcggtacaaccataatccaggaatggaaagaccgatggataacgcaccaacaatcgatgaagctgtaagaaagttggttaacagggtaatcatcaacggttcgctgtaacctaactggctgatttttaccgccgaaatcattgcggtataagccgatatgcccgggaacatagggataacggccgccacggtaaacactttcggatgcgccagataccagcgcgaccattgaataccaatggtaccgaccagcatagaagccataaaggttgaccactcaatattcaacccgctggtcatcaagatcattcgggaaccatgacctatcgagccaagcagcgcacaccagcgtaacgcccgcacgggaacgttgaacaccatcgcaaagccgaccgcaggaatggcggcgaggatcatatcctgcgccaacgctaacagaaattcgatcacacccatccgcgtagcccccaaatcgtcagtgccatcactacgccgacgcaggtagccagtgtcagcagactggcgatcgcccagcgtgccagtccggtattgatgtggcctttaaacatatcggcgacggcattaatcaacggaaagcccggcactagcagcagaacgctggcggccatcgcaatggtgggggtattgctgaaagtggggagttgcaaaagcaatccggaaatggtggtggcggcgaaagcggtaaggcaaaagttgatctgtggatgaagatgacgttgtgccagcagctggcggatatacatcgcggtcgtactggcaaagaaggtgatgacggcaccatcccagccaccgttattgagtttacagaaacaggcgcaagaaaggccaaccattaaggctaccagccatcttgggtaacgtaatggctgaatttggctaaatcgtttctctacgcctttgtaatccagcagatgatgctccgcaagaatcacaatgtgctggacttcagtcaccacatgcatattaatgccgcgatcgtgatttttacgtgtcgatgtcaggcattgcccatctttaatagttgtcagcactatggcgttcgaagagatagaactttcgacgctgtccattcccagtgcccgacccagtcgtgaggaaagctcatcaaccaacgcgctttccgcaccatgttgcaaaagaaataatccacactggatacaaagccgtgttacggctcgctgttgctcagtttgcataactcgccctttgtcatagacgtgctgcgtattgttcagataatgagaatccatttgtatcatgaagcacggttgttttgcggtaggttaagatcaaaattgcgctgattaatcctggttatcgggagaagctcggtgataaaaagcgaattatctctcgccgcaaacaaactatcacatgaatattatcatcataatgaatttattgtttggcctttacgaatcaggataatagataaccgggcacgttttttaatgttaacaagctaaaaccatcagatttcattgaataaatattggttgtgtgattttgcattctgcgggaagggatatcatttaattataaattaaatgaatgtgatttctgtttttcattaagtattcctaacaacttaatgtagatattttaaatgtctccaggctatttcaccaggttatcatttgatgctaaccttctgacacatgcagtggagttgttgtgcagcaggagtatgctgatatgaaagtgaatgctaaggataatttattcgcttaatctattaatttgctggaaacatttaaggaatgaatatcctgaataaaccatcataatttttagacagtggatgtggaggaaatatgttgccaggatgctgcaaaaatggaattgttatcagtaaaatacctgttatgcaagcagggttaaaagaggtcatgaggactcacttccctgaatatgaaataatatccagcgcctctgcggaggaccttaccttattacaattacgtcgttccggattagtcattgctgatttagccggtgaaagtgaagatccacgttctgtttgtgaacattattattctttaatctcacaatatcgggaaattcactgggttttcatggtgtcacgctcctggtattcccaggcagtagaactgctcatgtgccctacggcgacgttattgtctgatgttgaacccattgagaatctggtcaagaccgtacgttccggcaatacgcacgcagagcgtatcagcgccatgctgacctccccggcaatgactgaaactcatgattttagctatcgctccgtcattctcactctttcagagcgcaaggtactgcggctattaggtaaaggatggggcatcaaccagatagcttcattgcttaagaaaagtaataaaactatcagcgcccaaaaaaacagtgcgatgcgtcgactggcaattcacagcaacgctgaaatgtatgcatggataaatagcgcgcagggtgcaagagaacttaacttgccttctgtttatggagatgccgcagaatggaacacagccgaattaagaagagaaatgtcgcactcatagaaaaatgcgtcatgagtagtatcggtattgagagtttattcagaaagtttgcgggtaacccttataagctccatacctataccagtcaggagtcatttcaggatgccatgtcgcggatctcgtttgcggcggtcattttttctttttctgccatgagaagtgagcgcagagagggattatcttgcctgactgaactggcgattaagtttccgcgtacccggcgtttagttattgcggatgatgatattgaagctcggctgattggttcattgtcgccatcaccgctggacggtgtattaagtaaagcgtcaacgctggagatttttcatcaggaactctttttgtcattaaatggtgtacgtcaggcgaccgaccgactgaacaatcagtggtacattaaccaaagccggacgttaagcccgacggagagagaaatattgcgctttatgtcgcgtggctactcaatgacacaaattgccgagcagcttaaacgcaatatcaaaacgatccgtgcacataaatttaatgtgatgtcgaaactgggcgtcagttctgacgcagggttgttggaggccgcagatattctgttatgtatgcggcattgcgaaacaagtaatgtgttgcatccctattaatccgcatgatgccgggtttacttccccggcagtgctttcatttcagcgtacaatcgccacattgctgcacatccggtaagcgataacgctggcagcaagtgcggcgcaccagcaggccgtcgcgcagtaccacggtacgccagagtggattatcttcaccgttcgtgagcgttttctcaaaaaagagggcatggcgcagcgattcaacagtagcctcgccgagcagttgcttcatctcagtgagataccagttgatcaaataaccggtattactccagataagtttgccgttgatctctccggtcgcttctagtgcttgcacaaccggaaccagcgcctggctgattaacgtttccattcgatgctgcggcgaatgtggtgttgcgtttttatcttcacacacatcgacccagaaacaggcgacgcgtccggtttcgtgaaactcagcatggaaatgttccggcgacacatctaatgccttttcctgcgtcagtagcgccagcattaatggtggcaccatcaggccgatataccattgtgcccatagtgagatcagcggtttgttctcgcggatcatcatcggttggttgcgatagatatgatcggaatagaccgccagcagagaacttagcacattcggtgatgaccattgcgccagcgtcatggcgttaagtggggcaggttcatccaggcggataaactccagcaaatgttcacgatgttttgcgatcgtcgcccgcacggcttgcgcaagcgtgggatcctgcggctggagatgcgttcgccagatgacatcttcatagagcggtgcggaacgataggccataatcgggatagtaatctaaatgataatgattgctaatcatagcgataggtttacccgatagcaagggatttatctggcttgcaaatgataaaaattatcatatgatattggttatcattatcaatgaaagagatgaaatcatgttgcaacgtacgctgggcagtggctggggagtgttgctgccgggattgctgattgcagggctgatgtatgcggatttatcgtcagatcagtggcggattgtcattctgatgggattagtattgacgccgatgatgctgtatcacaaacagttgcggcattacattttgctaccatcgtgcctggcacttattgctggcatcatgctgatgataatgaatttgaatcagggatgaaaaatcaaggaagaaacaagaaaggaagtaaagataattggtgcgaggggggggacttgaacccccacgtccgtaaggacactaacacctgaagctagcgcgtctaccaattccgccaccttcgcacagtcatcttactttttttgatatcgcctcgtttggtgcgaggggggggacttgaacccccacgtccgtaagaacactaacacctgaagctagcgcgtctaccaattccgccaccttcgcccagtgcgagcaatatcaacgtggtttttggtgcgaggggggggacttgaacccccacgtccgtaaggacactaacacctgaagctagcgcgtctaccaattccgccaccttcgcataccatcaattcttaaaaagaattgctaccacggaggcgcattctagtggttttcagcttttcgtcaatagttaattatcgacagaggtgtaattgctggaaaaatgtccatcaggaaactagcgtgcaggtttggtatgcatgcgggggcagatgccagatgcgacgctggcgcgtcttatctggcctacgaagggctaacgtgcaggttttgtaggtcggataaggcgttcacgccgcatccgacacggtattcggcgagataattaacctttcttcgcctggcgggtcataatggcgcgatacaccttgaagcgccctgtttgcgcgatcacttcgtggaagccaaatgtctcatccagcacgtccggataaggcaggaaggcgttcgctacaattcgcagctcgccgccgctattaagatgacgcaccgcaccgcgaatcagcgtttgcgccgcatccaggctggtttgcatcccatcgtggaacggcgggttggagatgatcatatcaaaacgacctttcacctcggaaaagacgttgctggcaaagacttcaccttcaacaccgttggccgcaagtgttgcgcggctggcttctaccgccggggcagagacatcgcacaaggtgagacgaattttcggcgaatggcgcgcaaaggcaactgaaagcacgcccgcgccacagccgacatccagcactttacctttcgtgtgcggagttaacgtcgagagcagcaactggctaccgacatccagaccgtcgcggctaaacacgccaggcagcgttttgaccgtcaggccatcgacgctgtattcgccccagaatttctccgcatcaaataccggctgtttttccagacgaccaaaatagaggccacagcgacgagcgctgtcgactttattcaacggcgcataatctgccagcatctgctcggcgctgcgcacgccgctgcggttctcgccaacgacaaaaatatctgtccccactggcagcagagaaagtaaattcatcaactggaactgggcttccggtttgttcttcggccagtagtaaatcagcgtatcgcaatctgcgacgtcatccgccgtggcgaccagactgaaacgggcgttatcccccatctggcggcttaatacctgccagtggtggaattgctgggtatgagcacggctggccgcggtatctaaacgcgcgggcaggtcatcctgtaagtctccggcaaacagaatacggctttgttcgaaatcatcactgtgacgcagcaagacttcacttgccggggtaaatgcagacatggaatgctcctcaattgatactggcggcgattatagccatatgttggcgcggtatcgacgaatttgctatatttgcgcccctgacaacaggagcgattcgctatgacatcccgacgagactggcagttacagcaactgggcattacccagtggtcgctgcgtcgccctggcgcgttgcagggggagattgccattgcgatcccggcacacgtccgtctggtgatggtggcaaacgatcttcccgccctgactgatcctttagtgagcgatgttctgcgcgcattaaccgtcagccccgaccaggtgctgcaactgacgccagaaaaaatcgcgatgctgccgcaaggcagtcactgcaacagttggcggttgggtactgacgaaccgctatcactggaaggcgctcaggtggcatcaccggcgctcaccgatttacgggcaaacccaacggcacgcgccgcgttatggcaacaaatttgcacatatgaacacgatttcttccctcgaaacgactgatttaccggcggcttaccacattgaacaacgcgcccacgcctttccgtggagtgaaaaaacgtttgccagcaaccagggcgagcgttatctcaactttcagttaacgcaaaacggcaaaatggcggcgtttgcgattacgcaagtggtgctggatgaagctacattgttcaatattgcggtcgatcctgactatcagcgtcagggattgggaagggcgctgctggaacatctgatcgacgaactggaaaaacgcggcgtggcgacactatggctggaagtccgtgcttcaaacgctgccgccattgccctgtacgaaagtttaggctttaacgaggcgacgattcgccgcaattactaccccaccacggacggtcgcgaagacgccatcatcatggcgttgccaatcagtatgtaatacaaggtggaataatgaagtgggactggattttctttgatgccgatgaaacgctgtttacctttgactcattcaccggcctgcagcggatgtttcttgattacagcgtcacctttaccgctgaagattttcaggactatcaggccgttaacaagccactgtgggtggattatcaaaacggcgcgatcacttcattacagcttcagcacgggcggtttgagagctgggccgaacggctgaacgtcgagccaggtaaactcaacgaagcctttattaatgcgatggcggaaatctgcacgccgctgccgggcgcggtttctctgcttaacgccattcgtggcaacgccaaaatcggcatcatcaccaacggctttagtgccttgcaacaggtgcgtctggaacgcacgggcctgcgtgattacttcgatttgctggtgatttccgaagaagttggcgttgccaaaccgaataagaaaattttcgattatgcgctggaacaggcgggcaatcctgaccgttcacgcgtgctgatggttggcgacactgccgagtccgatattctcggtggcatcaacgccgggcttgcgacctgctggctgaatgcacaccatcgcgagcaaccagaaggcatcgcgcccacctggaccgtttcttcgttgcacgaactggagcagctcctgtgtaaacactgattgcctcccccccgttgatgggtaaaatagccgcaatttttcgttttcaacaagcgcggcgcgatgccgcttactcaagaagaaagaattatgacgttgtctccttatttgcaagaggtggcgaagcgccgcacttttgccattatttctcacccggacgccggtaagactaccatcaccgagaaggtgctgctgttcggacaggccattcagaccgccggtacagtaaaaggccgtggttccaaccagcacgctaagtcggactggatggagatggaaaagcagcgtgggatctccattactacgtctgtgatgcagtttccgtatcacgattgcctggttaacctgctcgacaccccggggcacgaagacttctcggaagatacctatcgtaccctgacggcggtggactgctgcctgatggttatcgacgccgcaaaaggtgttgaagatcgtacccgtaagctgatggaagttacccgtctgcgcgacacgccgatcctcacctttatgaacaaacttgaccgtgatatccgcgacccgatggagctgctcgatgaagttgagaacgagctgaaaatcggctgtgcgccgatcacctggccgattggctgcggcaagctgtttaaaggcgtttaccacctttataaagacgaaacctatctctatcagagcggtaaaggccacaccattcaggaagtccgcattgttaaagggctgaataacccggatctcgatgctgcggttggtgaagatctggcacagcagctgcgtgacgaactggaactggtgaaaggcgcgtctaacgagttcgacaaagagctgttccttgcgggcgaaatcactccggtattcttcggtactgcgctgggtaacttcggcgtcgatcatatgttggatggcctggtggagtgggcacctgcgccgatgccgcgtcagactgatacccgtaccgtagaagcgagcgaagataaatttaccggcttcgtatttaaaattcaggccaacatggacccgaaacaccgcgaccgcgtggcgtttatgcgtgtggtgtccggtaaatatgaaaaaggcatgaaactgcgccaggtgcgcactgcgaaagatgtggtgatctccgacgcgctgacctttatggcgggtgaccgttcgcacgttgaagaagcgtatccgggcgatatcctcggcctgcacaaccacggcaccattcagatcggcgacacctttacccagggtgagatgatgaagttcaccggtattccgaacttcgcaccagaactgttccgtcgtatccgcctgaaagatccgctgaagcaaaaacagctgctcaaagggctggtacagctttccgaagagggcgcggtgcaggtgttccgtccaatctccaacaacgatctgatcgttggtgcagttggtgtgctgcagtttgatgtggtggtagcgcgcctgaagagcgaatacaacgttgaagcagtgtatgagtcagtcaacgttgccactgcccgctgggtagaatgtgcagacgcgaagaaattcgaagagttcaagcgtaagaacgaaagccaactggcgcttgatggcggcgataacctcgcttacatcgctaccagcatggtcaacctgcgcctggcacaggaacgttatccggacgttcagttccaccagacccgcgagcattaattcttgcctccagggcgcggtagccgctgcgccctgtcaatttcccttccttattagccgcttacggaatgttcttaaaacattcacttttgcttatgttttcgctgatatcccgagcggtttcaaaattgtgatctatatttaacaaagtgatgacatttctgacggcgttaaataccgttcaatgcgtagatatcagtatctaaagccgtcgattgtcattctaccgatattaataactgattcagaggctgtaatggtcgttattcatcactcatcgcttttgtgatggcgaccattgacttctgtagagggtgaagtctctccctattcagcaatgcaacctcgtgttgccaggctcaaattacgagcaaacatacaggaataaatcgatgactatgacaagactgaagatttcgaaaactctgctggctgtaatgttgacctctgccgtcgcgaccggctctgcctacgcggaaaacaacgcgcagactaccaatgaaagcgcagggcaaaaagtcgatagctctatgaataaagtcggtaatttcatggatgacagcgccatcaccgcgaaagtgaaggcggccctggtggatcatgacaacatcaagagcaccgatatctctgtaaaaaccgatcaaaaagtcgtgaccctgagcggtttcgttgaaagccaggcccaggccgaagaggcagtgaaagtggcgaaaggcgttgaaggggtgacctctgtcagcgacaaactgcacgttcgcgacgctaaagaaggctcggtgaagggctacgcgggtgacaccgccaccaccagtgaaatcaaagccaaactgctggcggacgatatcgtcccttcccgtcatgtgaaagttgaaaccaccgacggcgtggttcagctctccggtaccgtcgattctcaggcacaaagtgaccgtgctgaaagtatcgccaaagcggtagatggtgtgaaaagcgttaaaaatgatctgaaaactaagtaattcgtcgtaattcgtcctcccgaactttgtcgggaggcgcgatgtgcaccacactaaaaatatcgcattgagtgattttcacgctcatatcaagcggtgacattaactatggtaaaggagacgcttatgtttcgttggggcatcatatttctggttatcgcgttaatcgccgccgcacttgggtttggtggtctggccggtaccgctgcaggcgcagctaaaattgtctttgtcgtcgggattattctgttcctggtgagtttgttcatgggccgaaaacgaccctagatttcagaccattaagaaaattttatccaaagccagtccagcggactggcttttgcggttttagcgaataataaattgcgttactttgtcattctttcacaacaaaaacaggaaggcagaggtggggcagcgaatacctgtaacgcttggtaatattgcgccgttgtcgctaaggccgttccagcctggacgaatagctctggtgtgcgaaggcggcggacagcgtggaattttcacggctggcgtgctggatgagtttatgcgcgcgcagtttaatcctttcgatctttatctcggcacatctgccggggcgcagaacctctcggcgtttatctgcaatcagcccggttacgcgcgcaaagtcatcatgcgctataccacaaaacgcgaatttttcgatccattgcgctttgtccgtggaggaaatcttatcgatctcgactggctggtggaggccactgcaagccagatgccgttgcaaatggataccgccgcgcggttgtttgacagcggcaaatcgttttatatgtgcgcctgtcgtcaggatgactacgcgccgaattactttttaccaaccaaacaaaactggctggatgtgattcgcgcctccagtgcgatacctggcttttatcgtagcggagtgtcgctggaaggcattaactacctggatggcgggatcagtgatgcgattccggttaaagaggcggcaaggcagggcgctaaaacgttggtcgtcattcgcactgtgccgtcacaaatgtactacacgccgcagtggttcaaacgcatggaacgctggctgggtgacagtagcctgcagccgctggtcaatctggtgcagcatcatgaaaccagctatcgtgacattcagcaatttattgagaaaccaccgggcaagctgcggatattcgaaatttatccgccgaagccattacatagtatcgcgcttggcagtcggattccggcgctgcgtgaagactataaacttgggcgtttatgcggtcgttatttcctcgccacggttggcaagctattaactgaaaaagcgccgcttacccgccatctggtgccagtggtgacgccggaatcgattgtcattccgcctgcgccagtcgccaacgatacgctggttgccgaagtgagcgacgctccgcaggcgaacgacccgacatttaacaatgaggatctggcttgatttgccgttttatcgacacccactgccattttgatttcccgccgtttagtggcgatgaagaggccagcctgcaacgcgcggcacaagcgggcgtaggcaagatcattgttccggcaacagaggcggaaaattttgcccgtgtgttggcattagcggaaaattatcaaccgctgtatgccgcattgggcttgcatcctggtatgttggaaaaacatagcgatgtgtctcttgagcagctacagcaggcgctggaaaggcgtccggcgaaggtggtggcggtgggggagatcggtctggatctctttggcgacgatccgcaatttgagaggcagcagtggttactcgacgaacaactgaaactggcgaaacgctacgatctgccggtgatcctgcattcacggcgcacgcacgacaaactggcgatgcatcttaaacgccacgatttaccgcgcactggcgtggttcacggtttttccggcagcctgcaacaggccgaacggtttgtacagctgggctacaaaattggcgtaggcggtactatcacctatccacgcgccagtaaaacccgcgatgtcatcgcaaaattaccgctggcatcgttattgctggaaaccgacgcgccggatatgccgctcaacggttttcaggggcagcctaaccgcccggagcaggctgcccgtgtgttcgccgtgctttgcgagttgcgccgggaaccggcggatgagattgcgcaagcgttgcttaataacacgtatacgttgtttaacgtgccgtaggccggataaggcgttcacgccgcatccggcagttggcgcacaatgcctgatgcgacgcttaacgcgtcttatcatgcctacaggtttgtgccgaaccgtaggccggataaggcgttcacgccgcatccggcagttggcgcacaatgcctgatgcgacgcttgtcgcgtcttatcatgcctacaagtctgtgccgaaccgtaggccggataaggcgttcacgccgcatccggcagtcggcgcataatgcctgatgcgacgcttgtcgcgtcttatcatgcctacaggtttgtgccgaaccgtaggccggataaggcgttcgcgccgcatccggcagttggcgcacaatgcctgatgcgacgcttgacgcgtcttatcaggcctacaagtctgtgccgaaccgtaggccgtatccggcatgtcacaaatagagcgccggaaatatcaaccggctcaccccgcgcacctttaacgcatcagccaacggctcaacgtcttccggcgtggcgctcgcccagctttgcgcctcgccatacacgccgtgggcatgaaacgcgttcaggcgtaccggaacatcgccgagtcccttgataaacgccgccagttcttcgatgtgttgcaaataatccacctggccagggatcaccagcaaacgcagttccgccagcttgccgcgctctgccagcaaatagatgctgcgcttaatctgctgattatcgcgtccggtgagttgttgatgacattcgctcccccacgctttgagatcgagcattgcgccgtcgcacaccgggagcaatttttcccagccggtttcgctcaacatgccgttactgtccaccagacaggtgagatggcgcagttgcggatcgtttttgatagcagtaaacagcgccaccacaaacggcagctgggtcgtggcttcaccgccactcaccgttatcccttcgataaacagcactgctttgcggacatggctaagcacttcgtccacgctcatggattgcgccatgggcgtggcatgttgcggacacctcttcaggcaggtatcacactgctcgcaaaccacagcgttccacaccactttgccgtcaacaatctgcaacgcctgatgcggacactgtggcacgcactccccacagtcattgcaacgtcccatcgtccacggattgtgacagtttttgcagcgcagattgcagccctgcaaaaacagagccagacgactgcctggcccgtcaacgcaggagaaggggataatcttactgactaaagcgcatctgctgttcatggcttatcacgcgcggctggcgttccagaatacgagtgttgcgtgcggcttcttcgcccagccaggtggtgttggtgcgtgaaccttcggcgcgatatttttctaaatccgacaaacgcaccatataaccggtaacgcgaaccagatcgttaccgctgacattggcggtaaattcacgcattccggctttaaaggcaccgaggcaaagctgtaccagtgcctgcgggttacgtttgatggtttcgtcgagcgtcagaatgtcgctgatgccggaataataataagcatgatgcggggcgacagtttgcagatgggtgatcggatctggctcatcgccatacggcaaacgcgcgcccggcgtggtgccgatatcggaactgatccccgactgtgcgtgtaacatggcgcgtttttgccagccatatttcacgggggtattggcgacaaactccgccagttgcgcgctgatgcgataacctacttcatttgcggcggcttctttaccgtagcgcgcggcaatcccttctttttcacacagcaagttaaccgcttccgccagcccatacatgccaaacattggcacaaaacgttcagggttaatcagcccttctttcaccaggaagctattctcaaagaagtgtgattgttgatagaggaattcacaccgcgcatcgatgatggcgatctgctgctggcagtagtgcggtagagtgcgcgtaaagaagtcatccagcgattcgctgcgctcggcaatggctttcaggttaaggcgtaccagcgtgctgccaccacccgccagcggcagtgagttgtaacagctcacaatcccgtagcccccttttgtgaaaattttatcatgcaccggaccgttggcgatgtgcggtttgctacattcacagatgttcttcgccacttccagcagcaggtcatcaggggtgatttcaggatcgtagataaaggtcaggttcggtgaaacctgcttcaactctgcatctgcacgtaagatcgcgcgggtaatgggcgaatcagacgggccgatattggcgtgcataaaggcgtctggcagggttctgtcgaggtaacgccagaaacgttttattcgaacatcgatctcgtcttgtgttagaattctaacatacggttgcaacaacgcatccagttgccccaggtagaccggcatcgatgtgaccgacggtacgtggtggtaaagaatggtcagcagagagagtgcgtcatcaagatctttcgcgccttccagctccagccattcggaaccgttcgccagaaaacgggcgtaatcgggtaagacatagcgcggtttgtacggcgcatgaccttcaaacatatcgcagattacaccttcatccagcgcgcggcgggcttcggcaggaagctgtgggtaaggcagattgttttctgcttccagtgccagaaaatggcgcttctgctccgggctaagcactgggctggtgacaatttgctggcaacgttgttgcagtgcattttcatgagaagtgggcatcttcttttccttttatgccgaaggtgatgcgccattgtaagaagtttcgtgatgttcactttgatcctgatgcgtttgccaccactgacgcattcatttgaaagtgaattatttgaaccagatcgcattacagtgatgcaaacttgtaagtagatttccttaattgtgatgtgtatcgaagtgtgttgcggagtagatgttagaatactaacaaactcgcaaggtgaattttattggcgacaagccaggagaatgaaatgactgatctgaaagcaagcagcctgcgtgcactgaaattgatggacctgaccaccctgaatgacgacgacaccgacgagaaagtgatcgccctgtgtcatcaggccaaaactccggtcggcaataccgccgctatctgtatctatcctcgctttatcccgattgctcgcaaaactctgaaagagcagggcaccccggaaatccgtatcgctacggtaaccaacttcccacacggtaacgacgacatcgacatcgcgctggcagaaacccgtgcggcaatcgcctacggtgctgatgaagttgacgttgtgttcccgtaccgcgcgctgatggcgggtaacgagcaggttggttttgacctggtgaaagcctgtaaagaggcttgcgcggcagcgaatgtactgctgaaagtgatcatcgaaaccggcgaactgaaagacgaagcgctgatccgtaaagcgtctgaaatctccatcaaagcgggtgcggacttcatcaaaacctctaccggtaaagtggctgtgaacgcgacgccggaaagcgcgcgcatcatgatggaagtgatccgtgatatgggcgtagaaaaaaccgttggtttcaaaccggcgggcggcgtgcgtactgcggaagatgcgcagaaatatctcgccattgcagatgaactgttcggtgctgactgggcagatgcgcgtcactaccgctttggcgcttccagcctgctggcaagcctgctgaaagcgctgggtcacggcgacggtaagagcgccagcagctactaagtaagatgctttacgcctgatgcgctgcgcttatcaggcctacgagacgtatctacccgtaggccggataaggcgtagacgcatccggcaaaagccgcctcatactcttttcctcgggaggttaccttgtttctcgcacaagaaattattcgtaaaaaacgtgatggtcatgcgctgagcgatgaagaaattcgtttctttatcaacggtattcgcgacaacactatctccgaagggcagattgccgccctcgcgatgaccattttcttccacgatatgacaatgcctgagcgtgtctcgctgaccatggcgatgcgagattcaggaaccgttctcgactggaaaagcctgcatctgaatggcccgattgttgataaacactccaccggtggcgtcggcgatgtgacttcgctgatgttggggccgatggtcgcagcctgcggcggctatattccgatgatctctggtcgcggcctcggtcatactggcggtacgctcgacaaactggaatccatccctggcttcgacattttcccggatgacaaccgtttccgcgaaattattaaagacgtcggcgtggcgattatcggtcagaccagttcactggctccggctgataaacgtttctacgcgacccgtgatattaccgcaaccgtggactccatcccgctgatcaccgcctctattctggcgaagaaacttgcggaaggtctggacgcgctggtgatggacgtgaaagtgggtagcggcgcgtttatgccgacctacgaactctctgaagcccttgccgaagcgattgttggcgtggctaacggcgctggcgtgcgcaccaccgcgctgctcaccgacatgaatcaggtactggcctccagtgcaggtaacgcggttgaagttcgtgaagcggtgcagttcctgacgggtgaatatcgtaacccgcgtctgtttgatgtcacgatggcgctgtgcgtggagatgctgatctccggcaaactggcgaaagatgacgccgaagcgcgcgcgaaattgcaggcggtgctggacaacggtaaagcggcagaagtctttggtcgtatggtagcggcacaaaaaggcccgaccgacttcgttgagaactacgcgaagtatctgccgacagcgatgctgacgaaagcagtctatgctgataccgaaggttttgtcagtgaaatggatacccgcgcgctggggatggcagtggttgcaatgggcggcggacgccgtcaggcatctgacaccatcgattacagcgtcggctttactgatatggcgcgtctgggcgaccaggtagacggtcagcgtccgctggcggttatccacgcgaaagacgaaaacaactggcaggaagcggcgaaagcggtgaaagcggcaattaaacttgccgataaagcaccggaaagcacaccaactgtctatcgccgtatcagcgaataacggtatactgatctgatcatttaaatttgaagcactgagtacggagaacatatgaaacgtgcatttattatggtgctggactcattcggcatcggcgctacagaagatgcagaacgctttggtgacgtcggggctgacaccctgggtcatatcgcagaagcttgtgccaaaggcgaagctgataacggtcgtaaaggcccgctcaatctgccaaatctgacccgtctggggctggcgaaagcacacgaaggttctaccggtttcattccggcgggaatggacggcaacgctgaagttatcggcgcgtacgcatgggcgcacgaaatgtcatccggtaaagataccccgtctggtcactgggaaattgccggtgtcccggttctgtttgagtggggatatttctccgatcacgaaaacagcttcccgcaagagctgctggataaactggtcgaacgcgctaatctgccgggttacctcggtaactgccactcttccggtacggtcattctggatcaactgggcgaagagcacatgaaaaccggcaagccgattttctatacctccgctgactccgtgttccagattgcctgccatgaagaaactttcggtctggataaactctacgaactgtgcgaaatcgcccgtgaagagctgaccaacggcggctacaatatcggtcgtgttatcgctcgtccgtttatcggcgacaaagccggtaacttccagcgtaccggtaaccgtcacgacctggctgttgagccgccagcaccgaccgtgctgcagaaactggttgatgaaaaacacggccaggtggtttctgtcggtaaaattgcggacatctacgccaactgcggtatcaccaaaaaagtgaaagcgactggcctggacgcgctgtttgacgccaccatcaaagagatgaaagaagcgggtgataacaccatcgtcttcaccaacttcgttgacttcgactcttcctggggccaccgtcgcgacgtcgccggttatgccgcgggtctggaactgttcgaccgccgtctgccggagctgatgtctctgctgcgcgatgacgacatcctgatcctcaccgctgaccacggttgcgatccgacctggaccggtactgaccacacgcgtgaacacattccggtactggtatatggcccgaaagtaaaaccgggctcactgggtcatcgtgaaaccttcgcggatatcggccagactctggcaaaatattttggtacttctgatatggaatatggcaaagccatgttctgatggatttgggcggagcgttgactccgcctttgttatgtcacaaaaaggataaaacaatggctaccccacacattaatgcagaaatgggcgatttcgctgacgtagttttgatgccaggcgacccgctgcgtgcgaagtatattgctgaaactttccttgaagatgcccgtgaagtgaacaacgttcgcggtatgctgggcttcaccggtacttacaaaggccgcaaaatttccgtaatgggtcacggtatgggtatcccgtcctgctccatctacaccaaagaactgatcaccgatttcggcgtgaagaaaattatccgcgtgggttcctgtggcgcagttctgccgcacgtaaaactgcgcgacgtcgttatcggtatgggtgcctgcaccgattccaaagttaaccgcatccgttttaaagaccatgactttgccgctatcgctgacttcgacatggtgcgtaacgcagtagatgcagctaaagcactgggtattgatgctcgcgtgggtaacctgttctccgctgacctgttctactctccggacggcgaaatgttcgacgtgatggaaaaatacggcattctcggcgtggaaatggaagcggctggtatctacggcgtcgctgcagaatttggcgcgaaagccctgaccatctgcaccgtatctgaccacatccgcactcacgagcagaccactgccgctgagcgtcagactaccttcaacgacatgatcaaaatcgcactggaatccgttctgctgggcgataaagagtaattgtgtttcgctgcaaggcgattgccttgtgaagccggagcgggagactgctccggctttttagtatctattcatttttctctccagcttgaatattttcgctatacttttcagtgaaatgtgttaataaatctattcaagtatctattcacgaatctattcattaatgagcgagctgactgatcttttactgcaagggccgcgttctgccccggaattgcgccagcgtctggcaatcagtcaggcgacgttctcacgccttgttgccagagaagatcgggtgattcgctttggtaaagcacgggcaacgcgatatgcactgctgcgtccttatcgcggaattgagcgtattcccgtctggcgggtggacgataccggaaaggcgcataaattcgccgacatccggttgtgctggccgcagggaagttgtctggtaacaggcgcagatggcgacgaacagtggtttgatggtttgccctggtatttgaccgatctccgaccgcagggctttttagggcgcgcgtggggcaggaagttagccgcgcaactgaatctgactgatgatatacgtctctggcaggaagaagatgtgctctacgccctgaccgtatttaacggtgaatatactggcggttggttggtcggggaggggaattatcagcgatggattactgcacaacaccctgcggaaattcctctggatcaaaaactcacccattacgaacagctggcaagtgatgcactggcaggagaaattgtgggttcttctgcgggcggcgagcagccaaaatttacctactatgcacaaacgccgtcaggcaataaacatgtgttggtgaaattcaccgtaccacagcaaaccgcggtcagccaacgttggggtgacctgctaattgctgaatctattgccgcgcaaatcctgcgtgacggtgggatccacgccatcgagtcaacggtgcttgtaacaagtaacaggcaggtattcctcgaagcggaacgctttgactgcaaaggtaacgatggtcgcttgcctattgtgtcgctggaggcggtgcagagtgagtttatctcttctccgggatcgtggccgcaggcaatgcgccgtttgtgtgagcaacaacttgtcactcaccagagcgtggcgcaaacagaagtgatctgggcatttgggcgacttatcgccaacagcgatatgcacgcaggtaatttatcgttttatttatctgaaccgccatttgcgctgacgcccgtctacgacatgctgccgatggtctatgcaccaaacagcgctggaatgctgcgtgatgctgccattgaggtgaagtttgatcttaacgtcagtaaaagcgcttggttaacggcgatcccgctggcgcagcagttctggcaaacggtcgccagagatccgcgtatcagcgaggcgtttcgccacattgcgcaagaaatgccggaaaaaatccggcaaatcgaagagaaagttgcccgcatgggcgggtaactaccttacagcccccgccatccatgccgataactcccgtagctctttttcctgttccgggaagtcaaccaacagcgcttcgcactcctgttgcagcatatctgcgcggtacaggcagccttgcagtcgtccggcgagggcttccagcggcgcggggttgaggctgtcggtaaacacctgggcgcgggtgatatggcctttttcaacgtcgaaatgcagttccacgccgccccaggtaaagcgttcatccagcagatgcgagaatgccggagcctgaccgaagttccattcccagctactctggcgggcaaaggtttcggcgaagtttggcaagtctggcgttttgttcggggagatgatttccgcttccacgcgctcgccataatgggcgaaaaaggcctcggttatggcctcgcaaacctgctcatgggtgatccccggcaacagctcggtgaggttggtcacgcgggaacgtaccgacgtaatgcctttcgccgccagtttctttttatccggattgagatagtttgccaggcggctgaggtcggcattgagtagcaaggtgccgtggtggaagccgcgatctttggtttcgcgataggccgagcctgagactttgcggtcgccttcgacggttttcaccaccagatcgttacgtccggacgcttcggcgctgacgccgagcgcgttcagcgcattgagcacaatcgacgtggagatagttttatcgtactccggcttgccagccataaaggtaaagcaggtattgccgagatcgtggaacaccgcgccgccaccgctactgcgccgcgccaggcggacgttatcttcttccatccgccgggtattacactctttccacgggttctgcgcgcgaccaattactaccgtgtcggcattgcgccagagaaacagaacgcgctgcgtggcgggcatttggcgaaaaatacactcttccaccgccaggttaaaccacgggtcgtaagagtcagagatgagcaggcgtaatgtggacataacgatttcctttcttgtagtaatgggtcactcttttttctcgctttcttcctcttccggcaccggtttgctggcggttaacaggaagggcgattgctgccagcgggtgcgtttaccctgtagcagcgtgcgggtcagcactacaccgattgccagtgagagcagcaacatcaggcgtaaaatgttagtggtgttatccacctgttgggcttcggtggcgagcgtatgggtgtcgagtgtcaggcgcagatagccgagcggtccgtttttacccgcaattggctcgacaatctgctggttaaaatagccgcctgcttttttaccgtcgagcgccagccggtcgcgcacttcgacgctttcgccagaacgtgcgataagatcgccttgttcgtcatacacacccgcgtcgaggatacggctttcatccgttaactgatcgaggatcgcctgaatgcgtttttcatccggtgagtcggtacgcatcagcggtgcaacgttcagcgtcacctgacgcgccagggtgcgggccagttcttccagctgtggattacgctgtcgctggtggttttgactaaaccatgacgctccctgcatcagcgccactaacaaggcaagacagaacaggacaatcactgcccgatgcagccggaatttcagttttgtgcgagccatcttccaccctttgaaaatttgagacttaatgttgccagaagcaatggatacaaggtagcctcatgcgttattttccctgcttcgaacgattttacaggagccttaatgcctaacattacctggtgcgacctgcctgaagatgtctctttatggccgggtctgcctctttcattaagtggtgatgaagtgatgccactggattaccacgcaggtcgtagcggctggctgctgtatggtcgtgggctggataaacaacgtctgacccaataccagagcaaactgggtgcggcgatggtgattgttgccgcctggtgcgtggaagattatcaggtgattcgtctggcaggttcactcaccgcacgggctacacgcctggcccacgaagcgcagctggatgtcgccccgctggggaaaatcccgcacctgcgcacgccgggtttgctggtgatggatatggactccaccgccatccagattgaatgtattgatgaaattgccaaactggccggaacgggcgagatggtggcggaagtaaccgaacgggcgatgcgcggcgaactcgattttaccgccagcctgcgcagccgtgtggcgacgctgaaaggcgctgacgccaatattctgcaacaggtgcgtgaaaatctgccgctgatgccaggcttaacgcaactggtgctcaagctggaaacgctgggctggaaagtggcgattgcctccggcggctttactttctttgctgaatacctgcgcgacaagctgcgcctgaccgccgtggtagccaatgaactggagatcatggacggtaaatttaccggcaatgtgatcggcgacatcgtagacgcgcagtacaaagcgaaaactctgactcgcctcgcgcaggagtatgaaatcccgctggcgcagaccgtggcgattggcgatggagccaatgacctgccgatgatcaaagcggcagggctggggattgcctaccatgccaagccaaaagtgaatgaaaaggcggaagtcaccatccgtcacgctgacctgatgggggtattctgcatcctctcaggcagcctgaatcagaagtaattgctcgcccgccatcctgcgggcggcacagcattaacgaggtacaccgtggcaaaagctccaaaacgcgcctttgtttgtaatgaatgcggggccgattatccgcgctggcaggggcagtgcagtgcctgtcatgcctggaacaccatcaccgaggtgcgtcttgctgcgtcgccaatggtggcgcgtaacgagcgtctcagcggctatgccggtagcgccggggtggcaaaagtccagaaactctccgatatcagccttgaagagctgccgcgtttttccaccggatttaaagagttcgaccgcgtactaggcggcggcgtggtgccaggaagtgccattctgattggcggtaaccctggtgcggggaaatccacgctgctactgcaaacgctgtgcaaactggcccagcagatgaaaacgctgtatgtcaccggcgaagagtcgctgcaacaggtggcaatgcgcgctcatcgccttggcctgccgactgacaatctcaatatgttgtcggaaaccagcatcgaacagatctgcctgattgccgaagaagagcaaccgaagctgatggtaattgactcgatccaggtgatgcatatggcggatgtacagtcatcgcctggtagcgtggcgcaggtgcgtgaaacggcggcttatttgacacgcttcgccaaaacgcgcggtgtggcgattgtcatggtggggcacgtaaccaaagatggttcgctggctggcccgaaagtgctggaacactgtatcgactgttcggtgcttttggatggcgatgccgactcccgttttcgcaccttgcgcagccataaaaaccgcttcggcgcggtgaatgagctgggcgtcttcgcgatgaccgaacaggggctgcgtgaagtcagcaacccttcggcaattttcttaagtcgcggcgatgaagtgacctccggtagctcagtgatggtggtatgggaaggaacgcgtccactgctggtggagattcaggcgctggtcgatcactcgatgatggcgaacccacgccgcgtggcagtggggctggaacaaaaccgtctggcaatcctgctggctgtgttgcaccgtcacggtggtctgcaaatggccgatcaggatgtgtttgtgaacgtggtcggcggcgtgaaggtaaccgaaaccagtgccgacttagcgttactgctggcgatggtttccagcctgcgcgacagaccgctgccgcaggatctggtggtgtttggtgaagtcgggctggcaggggagatccgcccggtgcccagcggtcaggaacgaatctctgaagcggcgaaacacggttttcgccgggcgattgttccggcggctaacgtgccgaaaaaagcgccggaagggatgcagatttttggcgttaaaaaactctccgacgcgcttagcgtgttcgacgacttataatgagatatacggagggagatatgtcgtcatttgattacctgaaaactgccatcaagcaacagggctgcacgctacagcaggtagctgatgccagcggtatgaccaaagggtatttaagccagttactgaatgccaaaatcaaaagccccagcgcgcaaaagctggaggcgttgcaccgttttttggggcttgagtttccccggcagaagaaaacgatcggtgtcgtattcggtaagttctacccactgcataccggacatatctaccttatccagcgcgcctgtagccaggttgacgagctgcatatcattatgggttttgacgatacccgtgaccgcgcgttgttcgaagacagtgccatgtcgcagcagccgaccgtgccggatcgtctgcgttggttattgcaaacttttaaatatcagaaaaatattcgcattcatgctttcaacgaagagggcatggagccgtatccgcacggctgggatgtgtggagcaacggcatcaaaaagtttatggctgaaaaagggatccagccggatctgatctacacctcggaagaagccgatgcgccacagtatatggaacatctggggatcgagacggtgctggtcgatccgaaacgtacctttatgagtatcagcggtgcgcagatccgcgaaaacccgttccgctactgggaatatattcctaccgaagtgaagccgttttttgtgcgtaccgtggcgatccttggcggcgagtcgagcggtaaatccaccctggtaaacaaacttgccaatatcttcaacaccaccagtgcgtgggaatatggccgcgattatgtcttttcacacctcggcggtgatgagatcgcattgcagtattctgactacgataaaatcgcgctgggccacgctcaatacattgattttgcggtgaaatatgccaataaagtggcatttatcgataccgattttgtcaccactcaggcgttctgcaaaaagtacgaagggcgggaacatccgttcgtgcaggcgctgattgatgaataccgtttcgatctggtgatcctgctggagaacaacacgccgtgggtggcggatggtttacgcagcctcggcagttcggtggatcgcaaagagttccagaacttgctggtggagatgctcgaagagaacaatatcgaatttgtgcgggttgaagaggaagattacgacagtcgtttcctgcgctgcgtggaactggtgcgggagatgatgggggagcagagataaccgtgatgaaactgctcaaaggcgaggtataaaatgagtttttttgatgagttgaaaacctctctggaagaggctgtcgagattaaacaaggtttgaaaaaacctgcacgggtgacccgccacgaaattgaggatgctaaggctgttgtagaccggaaacggtgttcacgccgcatccggcattcggtgctcaatgcctgatgcgacgcttaccgcgtcttatcaggcctacagttttacaacgtattgaaattgctggttttgtaggccggataaggcgttcgcgccgcatccggcattttacgcattacttcgcaatacgcttgtacttgatacgcttcggctccagcgcgtctgcgcccagcgtgcgtttcttgtactcttcgtactcggtaaagttaccttcgaagaactcaactttaccttcatcctggtaatccagaatgtgcgtggcgatacggtcgaggaaccaacggtcgtgcgagataaccatcgcacagcccgggaactccagcagggcgttttccagcgcgcgcagggtttcgatatccaggtcgttggttggttcgtcgagcagcagcatgttgccgccaacctgcagcagcttcgccagatgcagacgaccgcgctcaccaccggagagttcaccaacgcgtttaccctgatcaacccctttaaagttaaagcggccaacgtaggcgcggcttggcatctcggtgttgccgatcttcatgatatccagcccgccggaaacttcttcccaaacggttttgctgttatccattgagtcacggaactgatcaaccgacgccagtttcaccgtttcacccaaagtgatggtgccgctgtccggctgttcctgaccagagatcatacggaacagggtcgatttacccgcaccgttcggaccgatgatcccgacgatcgctcctttcgggatcgagaagctcaggtcatcaatcagcagacgatcgccataggatttacgcaggttgctgacttccagcactttatcgcccagacgcggtccaggtggaataaacagttcgttggtttcgttacgtttctgatattcggtgctgttcagttcttcaaagcgcgccagacgtgctttacctttcgactgacggcctttagtaccttgacgtacccattccagctctttctcaatcgacttacgacgcgccgcttcttgtgaagcttcctgcgccaggcgctgatctttctgctccagccaggaggagtagttaccttcccacggaataccttcaccgcggtcaagttcgaggatccagcctgcaacgttatcgaggaagtaacggtcgtgggtaatcgccacaacggtgccttcgaagtcgtgcaggaagcgttccagccaggccacggattcggcatccaggtggttggtcggttcgtcgagcagcagcatgtctggtttttccagcagcaggcggcacaacgctacgcgacgacgttcaccaccggagaggttagcgattttcgcgtcccagtccggcagacgtagcgcatccgccgcacgctccagctgtacgttcagattatgaccgtcgtgagcctgaatgatctcttccagacggccttgttcagcggccagcttgtcaaaatcggcatccggatcggcgtacagcgcatacacttcatccaggcgtttcagggcgttaaccacttctgaaaccgcttcttcaatggactcacgcacggtgtgttccgggttcagctgcggttcctgcggcagataaccaatcttgatgtctggctgcggacgcgcttcaccttcgatgtctttatcaatgcccgccataatgcgcagcagggtggacttacccgcgccattcagacccaggacaccaatttttgccccagggaagaaactcagagagatgtttttcaaaatatgacgtttcggcggaacaactttgccgacacgatgcatggtataaacgaattgagccacgttggacttcgcctctatgtttatcgtgataatgagttttcaaaggcgaagtgtagcctttttccccgcctaatcccagccggtcgatcaccctcgcagtaaaagtaaaaaagtgtccgtaacgtggcgtaaacggcaatgactggttagcataaatctattacgcggcatgacgctgcattgatgtatttacacttagaggatgcgcttgtggaaaaagccaaacaagttacctggcggctgttggctgccggtgtctgtctgctgacggtcagcagcgtggcgcgagccgactcactggatgagcagcgtagtcgttacgcgcaaatcaagcaggcctgggataatcgacaaatggatgtggtcgaacaaatgatgcctggactgaaggattatccgctttatccctacctggaataccgccagatcaccgatgatctgatgaatcaaccggcggtgacggtcactaactttgttcgcgctaaccccacgcttcctcccgctcgcacgctgcaatctcgtttcgtcaatgaactggcgcggcgtgaagactggcgtggcttgttagcctttagcccggaaaagcccggaactaccgaagcgcaatgtaattactactatgcgaaatggaacaccgggcagagtgaagaagcctggcaaggggcgaaagagctgtggctaaccggcaagagccagcctaacgcctgtgacaagttatttagcgtctggcgtgcgtcaggtaaacaagatccgctggcgtatttagagcgtatccgtctggcgatgaaagcgggtaacacaggcctggtaacagtgctggcagggcagatgcctgccgattaccagactatcgcctcggcaatcatttcactggcgaacaaccctaatacggtactgaccttcgcgcgtacaactggcgcgaccgattttacccgtcaaatggcggcggtggcgtttgccagtgtggcgcggcaggatgctgagaatgcacggctgatgatcccatcgcttgcccaggcgcagcagcttaatgaagatcagattcaggagctgcgcgatatcgtcgcctggcgtttgatgggcaacgatgtcaccgacgagcaggcgaaatggcgcgatgacgccattatgcgctcgcaatctacttcgcttattgaacgccgtgtacgaatggcgcttggcaccggcgatcgtcgcggcctgaatacctggctggcgcgtctgcctatggaagcgaaagagaaagatgaatggcgttactggcaggcggatttattgctggaacgcggacgtgaagctgaagcaaaagagattttgcatcaactcatgcaacagcgtggtttctacccgatggttgcagcacaacgcatcggcgaagagtatgagctgaagattgataaagcgccgcagaatgttgacagcgccctgactcaggggccggagatggcgcgcgtgcgcgagttgatgtactggaatctcgataataccgcgcgtagcgagtgggccaatctggtgaagagcaagtcaaaaacagagcaggctcaactggcgcggtatgctttcaacaaccaatggtgggatcttagcgttcaggcaacgatcgccgggaagctgtgggatcatctggaagagcgattcccgctggcttacaacgatcttttcaaacgctacaccagcggtaaggagatcccgcaaagctatgcgatggcgattgctcgtcaggagagcgcctggaatccgaaagtgaaatcaccggtaggggccagcggcttgatgcagattatgcctggtacagcgacccatacggtgaagatgttctctattcccggttatagcagtcctgggcaattgctggatccggaaacgaatatcaacattggcaccagttacctgcaatatgtttatcagcagtttggcaataatcgtattttctcctcagcagcttataacgccggaccagggcgggtgcgaacctggcttggcaacagcgccgggcgtatcgacgcagtggcatttgtcgagagtattccattctccgagacgcgcggttatgtgaagaacgtgctggcttatgacgcttactaccgctatttcatgggggataaaccgacgttgatgagcgccacggaatggggacgtcgttactgatccgcacgtttatgatatgctatcgtactctttagcgagtacaaccgggggaggcattttgcttcccccgctaacaatggcgacatattatggcccaacaatcaccctattcagcagcgatggcagaacagcgtcaccaggagtggttacgttttgtcgacctgcttaagaatgcctaccaaaacgatctccatttaccgttgttaaacctgatgctgacgccagatgagcgcgaagcgttggggactcgcgtgcgtattgtcgaagagctgttgcgcggcgaaatgagccagcgtgagttaaaaaatgaactcggcgcaggcatcgcgacgattacgcgtggatctaacagcctgaaagccgcgcccgtcgagctgcgccagtggctggaagaggtgttgctgaaaagcgattgattttgtaggcctgataagacgtggcgcatcaggcatcgtgcaccgaatgccggatgcggcgtgaacgccttatccgtcctacaaatacccgtaatttcaatatgtttggtaggcatgataagacgcggcagcgtcgcatcaggcgcttaatacacggcattatgaaacggactcagcgccaggatcaccgcctggtgatagacgctggcgcgagtgagtttcccggcggtaaacacgccgatcgccccttccttacgaccaatctcatcaataccggtataacgcgacatcacgggaccaagcgcctcaccttcacgcactttttccagaatcaccgcaggcaacggcaaagtagccgaacgcgcctcgccgcgctggctggcgttttcaatcaccacccaactgaaagtgctgtcaccatcgatgccagcttcaatcgccacccaaaaatcagcctctggaagtaaacggcgggcattggctacccgatttcgtgcgccagcgcgcgtttcctcactgccaaagggctgttccggtacaccgctctcgacggcaacggatgcaatatggcaggatccttcgccgaagatctcgtgaaatgcctgcagaatggcctgaattttagcgggattggtggtcgcacagacaacttggtgcataatcagcattactcagaaaattaacgttacagcagtatacggaaaaaaagcatgttacaggtatacctagtccgccacggtgaaacgcagtggaacgccgagcgacgtattcagggccagtctgacagcccgctgaccgccaaaggtgagcaacaggcgatgcaggtggcaacccgtgccaaagagcttggcattacgcatatcatcagtagcgatttaggacgcacccggcgtacggcggaaatcatcgcccaggcctgcggctgtgacatcatctttgattctcgcctgcgtgaattaaacatgggtgtgctggaaaaaagacatatcgattctctgaccgaagaagaagagaactggcgtcggcagctggtcaatggcaccgttgacgggcgtattcctgaaggcgagtcaatgcaggagctcagcgatcgcgtcaatgcggcactggaatcttgccgggacttaccgcagggaagccgaccgctgctggtgagtcatggtattgcactgggatgcctggtgagtacgattctcggattaccagcatgggcagagcgccgcttacgtctgcgtaactgttctatttcgcgcgtggattatcaggaaagcctgtggctggcgtctggctgggtcgttgaaaccgcaggggacatctcgcatctggacgcccctgcattagatgagctgcagcgttaacgacggatcggaatcagcagttcacagcgtagattaattgggcgatctcccgctttggcatcttctgccgggtagtatcgctcaatatcctgacctttacggcgcgtcaggttgagcattggcatgcacgttccgtataccgtcaggataaactcctgcacgccggttcccagaccttcataggtaaacatcacatattcgccgccctgcagcatcaccggatgccccgtcagtacatagccatctgcctgatcctgggctaacgcggtggtatagaatacctcttgctcgtcgtctttatcctgactcggacgcgtttcattcaggccgtagagcaccggcggaatggtcggcgcgttgccgagaaaatcgtgccagaactgataacgcatttcatggcggaaatcagagatttgctccagcgaacaggagtagctctgggtaacaccaatcagcggcgtatcttccagggtgacaaatttgtgctctggcatagtgaattcacccaggcgtagcggcgggcgaataccaaaggcgctccattcaggagaacggcggtaaagtgcaggagtctgggcaaactgcttcttgaatgcgcgggtaaatgtctgttgagagtcgaagcggtattgcagcgcgatgtccagaatcggacgcgcagtcaggcgtagtgcgaccgccgatttcgacaaacgacgagcacgaatatacgcgccaatagcatggccagtgacatctttaaacattctctgtaagtgccacttggaataacctgctttcgccgctacattgtcgagcgacaggggctgatccagatgaccttccagccagattaaaaggtcgcgaataatgccggcctgatccataaaatatcctcatcctttcaacaacgagcacctgacatcaggtaattggataatagcattttttgctgttttagcattcagtgtttttttcttagtagagtatgttttagggcttgacggaaataaaagtattgagattttgttcttaatcaatatgttatttaccgtgacgaactaattgctcgtgtaatagataaaaatggtaacaatatgaaatacaagcatttgatcctgtctttaagcctgataatgctggggccattggctcatgcagaagagattggttcggtcgacaccgtatttaaaatgatcggcccggatcacaaaattgttgtggaagcctttgatgatcccgatgtgaaaaatgtcacctgttatgtgagccgggcgaaaaccggtggtattaaagggggattgggtctggcggaagatacctccgatgcggccatttcttgtcagcaagtcgggccgattgaactgtcggatcgtattaaaaacggcaaagctcagggcgaggtagtattcaaaaaacgcacgtccctggtctttaagtcgttacaggtcgtgcgcttttatgatgccaaacgcaacgcgctcgcttatctggcttactccgacaaagttgtagaaggttcgccgaaaaacgcgattagcgcggttcctgtcatgccgtggcggcaataacagaggcgatttatgcaacgggaaacggtctggttagtggaagatgagcaagggatagccgacacgctggtctacatgttgcagcaggaaggttttgccgtcgaggtctttgagcgaggcttgccggtgctggataaagctcgcaagcaggtacccgacgtcatgattctcgatgttggtctgccggatattagcggctttgaattgtgccgccagttactggcgctccatccggcgttacctgtactgttcctgacggcccgaagtgaagaggtcgatcgcctgcttgggctggaaattggtgctgacgactacgtggctaaaccgttttcaccccgcgaagtgtgcgccagggtgcgcaccttactgcgtcgggtgaagaagttctcgacgccgtctcccgtcatccgtattggacattttgaattgaatgaacccgcggcgcagatcagctggtttgacacgccattagcgctgactcggtatgagtttttattgttgaagacgttactcaagtcaccgggccgcgtctggtcccgccagcaactgatggatagcgtatgggaagatgcgcaggacacctacgatcgcaccgtcgatacccacattaaaacgctgcgtgccaagctgcgcgccatcaaccccgatctttcaccgattaatactcatcgcggcatgggatatagcctgaggggcctgtaatgcgtatcggcatgcggttgttgctgggctattttttactggtggcggtggcagcctggttcgtactggccatttttgtcaaagaagttaaaccgggcgtgcgaagagcaacggaggggacgttgatcgacaccgcaacgttgctggcggagctggcgcgtcccgatttgctctctggggacccaacgcatgggcaactggcgcaggcgtttaatcagctacaacatcgcccgtttcgcgccaatatcggtggcattaacaaagtgcgcaatgaatatcatgtctatatgaccgatgcgcagggcaaagtattgttcgattcggcaaataaagccgttggacaggattattcgcgctggaatgacgtctggctaacgttgcgtggtcagtatggtgcgcgcagcacgttgcaaaatcctgccgatcccgaaagttctgtgatgtatgttgccgcaccgattatggacggctcgcggcttattggcgttttgagcgtaggcaaaccgaacgcggcgatggctccggtcattaagcgtagcgagcggcgaattttatgggccagcgccattttgttggggattgcactggtgattggcgcaggcatggtttggtggatcaaccgctctattgcccggctcactcgctatgctgattccgtcactgacaataagcccgttcctctccccgatctcggtagtagcgagttgcgtaaactcgcgcaggcgctggaaagtatgcgcgtgaagctggaagggaaaaactatattgagcagtatgtttacgcattaactcatgagctaaaaagcccactggcggcgattcgtggagcggcggaaattttacgcgaaggtccgccgccggaagtggtggctcgttttactgacaacattctgacgcaaaatgcgcgtatgcaggcattggtagaaacgttactacgccaggcaagactggagaatcgtcaggaagtcgttctgactgctgttgatgtggcggcattattccgccgcgtcagcgaagcgcgcaccgtgcagttggcagaaaaaaaaatcactctgcatgttacgcccaccgaggttaacgttgctgctgaaccggcgttactggagcaggcgctgggaaatttactggataacgccatcgattttacccccgagagcggttgcatcacgctaagcgccgaagtggatcaggaacacgtcacgcttaaggtgctggataccggtagtggtattcctgactacgcgctttcacgtatttttgaacgcttttactctttgcctcgtgcaaatgggcaaaaaagcagcggtctggggttggcgttcgtcagtgaggtcgcccgtttgtttaacggcgaagtcacgctgcgcaacgtgcaggaaggtggcgtgctggcctcgcttcgacttcaccgtcacttcacatagcttcaaattcttcccacatagtcttcgtatcctgctgccattgcaaaggagaagactatgttgaaatcccccctgttctggaaaatgactagcctgtttggtgcagtattgctgttgttgattccgataatgctgattcggcaggtgattgtcgaacgtgctgattaccgtagcgatgtggaagatgcgattcgccaaagtaccagcgggccgcaaaaactcgttgggccgctcatcgctattcctgtgaccgagctttatacggtgcaggaagaggataaaaccgtggagcggaaacgaagttttatccatttttggttacctgagtcattgatggttgatggcaatcagaacgtggaagaacgcaagatagggatttataccggtcaggtctggcacagtgatttaacgttaaaagccgatttcgatgtttcgcgtcttagcgaactcaacgcgccaaatatcaccttaggcaagccatttattgtgattagcgtcggggatgcgcgtggtattggtgtggtgaaagcgcctgaagttaacggaacggcgctgaccattgaacccggcaccgggttagagcaaggcgggcagggcgtgcatatccctttacctgaaggggactggcggaagcagaacctgaagctgaatatggccctgaatttaagcggtaccggcgatctttctgtggtgcctggcgggcgtaatagcgaaatgaccttaaccagcaactggccgcatcccagttttttaggtgattttctaccagccaaacgggaagttagcgagtcaggttttcaggcgcactggcaaagcagctggtttgctaataatctcggtgagcgttttgcttcaggcaatgataccggctgggaaaacttcccggcgtttagcgtcgcagtaacgacgccagccgatcaataccaattaactgaccgggcgactaagtacgccattctgctgattgcactgacttttatggcgttctttgtttttgaaacgctcaccgcgcaacgtttacacccaatgcaatatttgctggtggggctttcattggtgatgttttatttgctcttgctggcgctttctgaacataccggttttaccgtggcatggataatcgccagtctgattggggcgataatgaacggtatttatttgcaagcggtattgaaaggttggtgcaacagcatgttgtttaccctcgcgctgttgttgctggatggtgtgatgtggggactgctcaactctgccgatagcgcgctgttgttgggaaccagtgtgctggtggtggcgctggccggcatgatgtttgtgacccgtaatatcgactggtatgcgttttcactgccgaaaatgaaagccagtaaagaagttacaacggacgatgagttacgtatctggaaataaggttgaaaaataaaaacggcgctaaaaagcgccgttttttttgacggtggtaaagccgattaatcttccagatcaccgcagaagcgataaccttcaccgtgaatggtggcgatgatttccggcgtatccggcgtagattcgaaatgtttacgaatacggcggatcgtcacgtctacagtacggtcgtgcggtttcagctcacggccggtcattttcttcagcagttcagcacgggactgaattttgcctgggttttcacagaagtgaagcatggcgcggaactcgctgcgcggcagcttgtactgctcgccatcagggccgatcaacgaacggctgttgatgtccagttcccaaccattgaacttgtagctttcaacgctacgacgttcttcgctgacagtacccagattcatggtacgggacagtaggttgcgtgcacgaatcgtcagttcacgcgggttgaacggtttggtgatgtagtcatctgcaccgatttcgaggccgagaattttatcgacttcgttgtcacggccagtcaggaacatcaacgcaacattcgcctgctcgcgcagttcacgcgctaacagaagaccgttcttacccggcagattgatatccatgatcaccaggttgatgtcatattcagagaggatctgatgcatttccgcgccatctgtcgcttcgaaaacatcatagccttccgcttcgaaaatacttttcaacgtgttgcgtgttaccaactcgtcttcaacgataagaatgtgcggggtctgcatgtttgctacctaaattgccaactaaatcgaaacaggaagtacaaaagtccctgacctgcctgatgcatgctgcaaattaacatgatcggcgtaacatgactaaagtacgtaattgcgttcttgatgcactttccatcaacgtcaacaacatcattagcttggtcgtgggtactttccctcaggacccgacagtgtcaaaaacggctgtcatcctaaccattttaacagcaacataacaggctaagaggggccggacacccaataaaactacgcttcgttgacatatatcaagttcaattgtagcacgttaacagtttgatgaaatcatcgtatctaaatgctagctttcgtcacattattttaataatccaactagttgcatcatacaactaataaacgtggtgaatccaattgtcgagatttattttttataaaattatcctaagtaaacagaaggatatgtagcattttttaacaactcaaccgttagtacagtcaggaaatagtttagccttttttaagctaagtaaagggctttttctgcgacttacgttaagaatttgtaaattcgcaccgcgtaataagttgacagtgatcacccggttcgcggttatttgatcaagaagagtggcaatatgcgtataacgattattctggtcgcacccgccagagcagaaaatattggggcagcggcgcgggcaatgaaaacgatggggtttagcgatctgcggattgtcgatagtcaggcacacctggagccagccacccgctgggtcgcacatggatctggtgatattattgataatattaaagttttcccgacattggctgaatcgttacacgatgtcgatttcactgtcgccaccactgcgcgcagtcgggcgaaatatcattactacgccacgccagttgaactggtgccgctgttagaggaaaaatcttcatggatgagccatgccgcgctggtgtttggtcgcgaagattccgggttgactaacgaagagttagcgttggctgacgttcttactggtgtgccgatggtggcggattatccttcgctcaatctggggcaggcggtgatggtctattgctatcaattagcaacattaatacaacaaccggcgaaaagtgatgcaacggcagaccaacatcaactgcaagctttacgcgaacgagccatgacattgctgacgactctggcagtggcagatgacataaaactggtcgactggttacaacaacgcctggggcttttagagcaacgagacacggcaatgttgcaccgtttgctgcatgatattgaaaaaaatatcaccaaataaaaaacgccttagtaagtatttttc
